(19) United States
(12) Patent Application Publication
(10) Pub. No.: US 2004/0166519 A1
(43) Pub. Date: Aug. 26, 2004

(54) Genetic polymorphisms associated with stenosis, methods of detection and uses thereof

(75) Inventors: Michele Cargill, Rockville, MD (US); James J. Devlin, Rockville, MD (US); May M. Luke, Rockville, MD (US)

Correspondence Address: CELERA GENOMICS CORP., ATTN: WAYNE MONTGOMERY, VICE PRES, INTEL PROPERTY, 45 WEST GUDE DRIVE, C2-4#20, ROCKVILLE, MD, 20850, US

(73) Assignee: APPLERA CORPORATION, Norwalk, CT

(21) Appl. No.: 10/741,601

(22) Filed: Dec. 22, 2003

Related U.S. Application Data
(60) Provisional application No. 60/434,741, filed on Dec. 20, 2002.
(60) Provisional application No. 60/453,050, filed on Mar. 10, 2003.
(60) Provisional application No. 60/466,437, filed on Apr. 30, 2003.

(51) Int. Cl. C12Q 1/68; C07H 21/04

(52) U.S. Cl. 435/6; 536/23.2

(57) ABSTRACT

The present invention is based on the discovery of genetic polymorphisms that are associated with stenosis. In particular, the present invention relates to nucleic acid molecules containing the polymorphisms, variant proteins encoded by such nucleic acid molecules, reagents for detecting the polymorphic nucleic acid molecules and proteins, and methods of using the nucleic acid and proteins as well as methods of using reagents for their detection.

### FIELD OF THE INVENTION

[0001] The present invention is in the field of stenosis diagnosis and therapy. In particular, the present invention relates to specific single nucleotide polymorphisms (SNPs) in the human genome, and their association with stenosis and related pathologies. Based on differences in allele frequencies in the stenosis patient population relative to normal individuals, the naturally-occurring SNPs disclosed herein can be used as targets for the design of diagnostic reagents and the development of therapeutic agents, as well as for disease association and linkage analysis. In particular, the SNPs of the present invention are useful for identifying an individual who is at an increased or decreased risk of developing stenosis and for early detection of the disease, for providing clinically important information for the prevention and/or treatment of stenosis, and for screening and selecting therapeutic agents. The SNPs disclosed herein are also useful for human identification applications. Methods, assays, kits, and reagents for detecting the presence of these polymorphisms and their encoded products are provided.

### BACKGROUND OF THE INVENTION

[0002] Stenosis

[0003] Coronary stenosis is the narrowing of coronary arteries by obstructive atherosclerotic plaques. The coronary arteries supply oxygenated blood flow to the myocardium. Although mild and moderate coronary stenosis do not impede resting coronary flow, stenosis >30-45% starts to restrict maximal coronary flow. Severe coronary stenosis (>70% reduction in luminal diameter) causes stable angina (ischemic chest pain upon exertion). Significant stenosis contributes, along with plaque rupture and thrombus formation, coronary spasm, or inflammation/infection, to unstable angina as well as myocardial infarction. Together with arrhythmia, coronary stenosis is a major factor of sudden cardiac deaths, as evidenced by its presence in two or more major coronary arteries in 90% of adult sudden cardiac death victims.

[0004] Coronary stenosis is a prevalent disease. Each year in the United States, 440,000 new cases of stable angina and 150,000 new cases of unstable angina occur. This year, an estimated 1.1 million Americans will have a new or recurrent heart attack. These incidences result in over six million individuals in the U.S. living with stable or unstable angina pectoris, a debilitating condition, and over seven million individuals in the U.S. living with a history of myocardial infarction. Coronary stenosis is frequently a deadly disease. It is a major underlying cause of coronary heart disease (CHD), which is the single largest cause of death in the U.S. Over half a million coronary deaths, including 250,000 sudden cardiac deaths, occur each year in U.S. Coronary stenosis is also a costly disease. It is the major reason for 1.2 million cardiac catheterizations, 0.4 million angioplasties, and 0.6 million bypass surgeries, contributing to the estimated 110 billion dollar total costs of CHD in the U.S. for the year 2002. Still, these statistics underestimate the true prevalence of the disease since coronary stenosis often remains clinically asymptomatic for decades, and only becomes symptomatic when the disease has progressed to a severe, and sometime fatal, state.

[0005] There is therefore an unmet need in early diagnosis and prognosis of asymptomatic coronary stenosis. This need is particularly significant given that early diagnosis or prognosis results can significantly influence the course of disease by influencing treatment choices (for example, those with genetic risks can be treated to modify risk factors such as hypertension, diabetes, inactivity, dyslipidemia, etc.), thresholds (e.g., lipid levels used to trigger the use of lipid-lowering drugs), and goals (e.g., target blood pressure or lipid levels), and possibly enhance compliance.

[0006] Diagnosis of coronary stenosis currently starts by assessing if the risk profiles (e.g., hypertension, dyslipidemia, family history, diabetes, etc.) and symptoms (e.g., angina) of patients are consistent with coronary heart disease, followed most commonly by resting and exercise EKGs. However, risk assessments and EKGs are imperfect diagnostic tests for stenosis since they can be both insensitive (giving false negatives) and non-specific (giving false positives). Coronary arteriography is the definitive test for assessing the severity of coronary stenosis, however, it is not very sensitive in early detection of mild stenosis. It is also an invasive procedure with a small risk of death due to the catheterization procedure and the contrast dye. Because of this risk, it is typically only used at a time when coronary stenosis is considered likely from symptoms or other tests, which is hardly an ideal time to start intervention.

[0007] Coronary stenosis risk is presumed to have a strong genetic component. It is well known that several major risk factors of coronary disease are heritable, e.g. serum lipid levels (Perusse L. et. al., Arterioscler Thromb Vasc Biol (1997): 17(11) 3263-9) and obesity (Rice T. et. al., Int J Obes Relat Metab Disord (1997):21(11) 1024-31). Indeed, several known genetic defects are individually sufficient to cause elevated serum LDL-cholesterol (e.g., familial hypercholesterolemia) leading to premature coronary disease (Goldstein and Brown, Science 292 (2001): 1310-12). In addition, linkage studies in humans have replicated the findings of the link of several chromosomal regions (quantitative trait loci) to coronary heart disease and related diseases and risk factors (Pajukanta P. et. al., Am J Hum Genet 67 (2000):1481-93, Francke S. et. al., Human Molecular Genetics (2001): 10 (24) 2751-65). Finally, a family history of premature coronary disease is a significant factor in the risk assessment and diagnosis of coronary disease (Braunwald E., Zipes D. and Libby P., Heart Disease, 6^{th} ed. W. B. Saunders Company, 2001, 28).

[0008] Although many risk factors for coronary stenosis have been identified, including age, diabetes, hypertension, high serum cholesterol, smoking, etc., and genetic factors play significant roles in several of these risk factors, significant genetic risk factors are likely to exist which have not been identified to date. In addition to the anecdotal coronary disease patients that exhibit few traditional risk factors, a study of multiple existing risk factors showed that only half of the “population-attributable risk” was attributable to known risk factors (Change M. et. al., J Clin Epidemiol (2001) 54 (6) 634-44). Therefore, the presently known risk factors are inadequate for predicting coronary stenosis risk in individuals. Given the magnitude of the disease, there is an urgent need for genetic markers that are predictive of coronary stenosis risk. Such genetic markers could increase the prognostic ability of existing risk assessment methods and complement current diagnostic methods such as exercise EKG, especially in early detection of disease when intervention is most effective and should ideally start.

[0009] SNPs

[0010] The genomes of all organisms undergo spontaneous mutation in the course of their continuing evolution, generating variant forms of progenitor genetic sequences (Gusella, Ann. Rev. Biochem. 55, 831-854 (1986)). A variant form may confer an evolutionary advantage or disadvantage relative to a progenitor form or may be neutral. In some instances, a variant form confers an evolutionary advantage to the species and is eventually incorporated into the DNA of many or most members of the species and effectively becomes the progenitor form. Additionally, the effects of a variant form may be both beneficial and detrimental, depending on the circumstances. For example, a heterozygous sickle cell mutation confers resistance to malaria, but a homozygous sickle cell mutation is usually lethal. In many cases, both progenitor and variant forms survive and co-exist in a species population. The coexistence of multiple forms of a genetic sequence gives rise to genetic polymorphisms, including SNPs.

[0011] Approximately 90% of all polymorphisms in the human genome are SNPs. SNPs are single base positions in DNA at which different alleles, or alternative nucleotides, exist in a population. The SNP position (interchangeably referred to herein as SNP, SNP site, or SNP locus) is usually preceded by and followed by highly conserved sequences of the allele (e.g., sequences that vary in less than 1/100 or 1/1000 members of the populations). An individual may be homozygous or heterozygous for an allele at each SNP position. A SNP can, in some instances, be referred to as a “cSNP” to denote that the nucleotide sequence containing the SNP is an amino acid coding sequence.

[0012] A SNP may arise from a substitution of one nucleotide for another at the polymorphic site. Substitutions can be transitions or transversions. A transition is the replacement of one purine nucleotide by another purine nucleotide, or one pyrimidine by another pyrimidine. A transversion is the replacement of a purine by a pyrimidine, or vice versa. A SNP may also be a single base insertion or deletion variant referred to as an “indel” (Weber et al., “Human diallelic insertion/deletion polymorphisms”, Am J Hum Genet 2002 October; 71(4):854-62).

[0013] A synonymous codon change, or silent mutation/SNP (terms such as “SNP”, “polymorphism”, “mutation”, “mutant”, “variation”, and “variant” are used herein interchangeably), is one that does not result in a change of amino acid due to the degeneracy of the genetic code. A substitution that changes a codon coding for one amino acid to a codon coding for a different amino acid (i.e., a non-synonymous codon change) is referred to as a missense mutation. A nonsense mutation results in a type of non-synonymous codon change in which a stop codon is formed, thereby leading to premature termination of a polypeptide chain and a truncated protein. A read-through mutation is another type of non-synonymous codon change that causes the destruction of a stop codon, thereby resulting in an extended polypeptide product. While SNPs can be bi-, tri-, or tetra-allelic, the vast majority of the SNPs are bi-allelic, and are thus often referred to as “bi-allelic markers”, or “di-allelic markers”.

[0014] As used herein, references to SNPs and SNP genotypes include individual SNPs and/or haplotypes, which are groups of SNPs that are generally inherited together. Haplotypes can have stronger correlations with diseases or other phenotypic effects compared with individual SNPs, and therefore may provide increased diagnostic accuracy in some cases (Stephens et al. Science 293, 489-493, 20 July 2001).

[0015] Causative SNPs are those SNPs that produce alterations in gene expression or in the expression, structure, and/or function of a gene product, and therefore are most predictive of a possible clinical phenotype. One such class includes SNPs falling within regions of genes encoding a polypeptide product, i.e. cSNPs. These SNPs may result in an alteration of the amino acid sequence of the polypeptide product (i.e., non-synonymous codon changes) and give rise to the expression of a defective or other variant protein. Furthermore, in the case of nonsense mutations, a SNP may lead to premature termination of a polypeptide product. Such variant products can result in a pathological condition, e.g., genetic disease. Examples of genes in which a SNP within a coding sequence causes a genetic disease include sickle cell anemia and cystic fibrosis.

[0016] Causative SNPs do not necessarily have to occur in coding regions; causative SNPs can occur in, for example, any genetic region that can ultimately affect the expression, structure, and/or activity of the protein encoded by a nucleic acid. Such genetic regions include, for example, those involved in transcription, such as SNPs in transcription factor binding domains, SNPs in promoter regions, in areas involved in transcript processing, such as SNPs at intron-exon boundaries that may cause defective splicing, or SNPs in mRNA processing signal sequences such as polyadenylation signal regions. Some SNPs that are not causative SNPs nevertheless are in close association with, and therefore segregate with, a disease-causing sequence. In this situation, the presence of a SNP correlates with the presence of, or predisposition to, or an increased risk in developing the disease. These SNPs, although not causative, are nonetheless also useful for diagnostics, disease predisposition screening, and other uses.

[0017] An association study of a SNP and a specific disorder involves determining the presence or frequency of the SNP allele in biological samples from individuals with the disorder of interest, such as stenosis, and comparing the information to that of controls (i.e., individuals who do not have the disorder; controls may be also referred to as “healthy” or “normal” individuals) who are preferably of similar age and race. The appropriate selection of patients and controls is important to the success of SNP association studies. Therefore, a pool of individuals with well-characterized phenotypes is extremely desirable.

[0018] A SNP may be screened in diseased tissue samples or any biological sample obtained from a diseased individual, and compared to control samples, and selected for its increased (or decreased) occurrence in a specific pathological condition, such as pathologies related to stenosis. Once a statistically significant association is established between one or more SNP(s) and a pathological condition (or other phenotype) of interest, then the region around the SNP can optionally be thoroughly screened to identify the causative genetic locus/sequence(s) (e.g., causative SNP/mutation, gene, regulatory, region, etc.) that influences the pathological condition or phenotype. Association studies may be conducted within the general population and are not limited to studies performed on related individuals in affected families (linkage studies).

[0019] Clinical trials have shown that patient response to treatment with pharmaceuticals is often heterogeneous. There is a continuing need to improve pharmaceutical agent design and therapy. In that regard, SNPs can be used to identify patients most suited to therapy with particular pharmaceutical agents (this is often termed “pharmacogenomics”). Similarly, SNPs can be used to exclude patients from certain treatment due to the patient's increased likelihood of developing toxic side effects or their likelihood of not responding to the treatment. Pharmacogenomics can also be used in pharmaceutical research to assist the drug development and selection process. (Linder et al. (1997), Clinical Chemistry, 43, 254; Marshall (1997), Nature Biotechnology, 15, 1249; International Patent Application WO 97/40462, Spectra Biomedical; and Schafer et al. (1998), Nature Biotechnology, 16, 3).

### SUMMARY OF THE INVENTION

[0020] The present invention relates to the identification of novel SNPs, unique combinations of such SNPs, and haplotypes of SNPs that are associated with stenosis and related pathologies. The polymorphisms disclosed herein are directly useful as targets for the design of diagnostic reagents and the development of therapeutic agents for use in the diagnosis and treatment of stenosis and related pathologies.

[0021] Based on the identification of SNPs associated with stenosis, the present invention also provides methods of detecting these variants as well as the design and preparation of detection reagents needed to accomplish this task. The invention specifically provides novel SNPs in genetic sequences involved in stenosis, variant proteins encoded by nucleic acid molecules containing such SNPs, antibodies to the encoded variant proteins, computer-based and data storage systems containing the novel SNP information, methods of detecting these SNPs in a test sample, methods of identifying individuals who have an altered (i.e., increased or decreased) risk of developing stenosis based on the presence of a SNP disclosed herein or its encoded product, methods of identifying individuals who are more or less likely to respond to a treatment, methods of screening for compounds useful in the treatment of a disorder associated with a variant gene/protein, compounds identified by these methods, methods of treating disorders mediated by a variant gene/protein, and methods of using the novel SNPs of the present invention for human identification.

[0022] In Tables 1-2, the present invention provides gene information, transcript sequences (SEQ ID NOS:1-284), encoded amino acid sequences (SEQ ID NOS:285-568), genomic sequences (SEQ ID NOS:5608-5780), transcript-based context sequences (SEQ ID NOS:569-5607) and genomic-based context sequences (SEQ ID NOS:5781-26,130) that contain the SNPs of the present invention, and extensive SNP information that includes observed alleles, allele frequencies, populations/ethnic groups in which alleles have been observed, information about the type of SNP and corresponding functional effect, and, for cSNPs, information about the encoded polypeptide product. The transcript sequences (SEQ ID NOS:1-284), amino acid sequences (SEQ ID NOS:285-568), genomic sequences (SEQ ID NOS:5608-5780), transcript-based SNP context sequences (SEQ ID NOS: 569-5607), and genomic-based SNP context sequences (SEQ ID NOS:5781-26,130) are also provided in the Sequence Listing.

[0023] In a specific embodiment of the present invention, naturally-occurring SNPs in the human genome are provided. These SNPs are associated with stenosis such that they can have a variety of uses in the diagnosis and/or treatment of stenosis. One aspect of the present invention relates to an isolated nucleic acid molecule comprising a nucleotide sequence in which at least one nucleotide is a SNP disclosed in Tables 3 and/or 4. In an alternative embodiment, a nucleic acid of the invention is an amplified polynucleotide, which is produced by amplification of a SNP-containing nucleic acid template. In another embodiment, the invention provides for a variant protein which is encoded by a nucleic acid molecule containing a SNP disclosed herein.

[0024] In yet another embodiment of the invention, a reagent for detecting a SNP in the context of its naturally-occurring flanking nucleotide sequences (which can be, e.g., either DNA or mRNA) is provided. In particular, such a reagent may be in the form of, for example, a hybridization probe or an amplification primer that is useful in the specific detection of a SNP of interest. In an alternative embodiment, a protein detection reagent is used to detect a variant protein which is encoded by a nucleic acid molecule containing a SNP disclosed herein. A preferred embodiment of a protein detection reagent is an antibody or an antigen-reactive antibody fragment.

[0025] Also provided in the invention are kits comprising SNP detection reagents, and methods for detecting the SNPs disclosed herein by employing detection reagents. In a specific embodiment, the present invention provides for a method of identifying an individual having an increased or decreased risk of developing stenosis by detecting the presence or absence of a SNP allele disclosed herein. In another embodiment, a method for diagnosis of stenosis by detecting the presence or absence of a SNP allele disclosed herein is provided.

[0026] The nucleic acid molecules of the invention can be inserted in an expression vector, such as to produce a variant protein in a host cell. Thus, the present invention also provides for a vector comprising a SNP-containing nucleic acid molecule, genetically-engineered host cells containing the vector, and methods for expressing a recombinant variant protein using such host cells. In another specific embodiment, the host cells, SNP-containing nucleic acid molecules, and/or variant proteins can be used as targets in a method for screening and identifying therapeutic agents or pharmaceutical compounds useful in the treatment of stenosis.

[0027] An aspect of this invention is a method for treating stenosis in a human subject wherein said human subject harbors a gene, transcript, and/or encoded protein identified in Tables 1-2, which method comprises administering to said human subject a therapeutically or prophylactically effective amount of one or more agents counteracting the effects of the disease, such as by inhibiting (or stimulating) the activity of the gene, transcript, and/or encoded protein identified in Tables 1-2.

[0028] Another aspect of this invention is a method for identifying an agent useful in therapeutically or prophylactically treating stenosis in a human subject wherein said human subject harbors a gene, transcript, and/or encoded protein identified in Tables 1-2, which method comprises contacting the gene, transcript, or encoded protein with a candidate agent under conditions suitable to allow formation of a binding complex between the gene, transcript, or encoded protein and the candidate agent and detecting the formation of the binding complex, wherein the presence of the complex identifies said agent.

[0029] Another aspect of this invention is a method for treating stenosis in a human subject, which method comprises:

[0030] (i) determining that said human subject harbors a gene, transcript, and/or encoded protein identified in Tables 1-2, and

[0031] (ii) administering to said subject a therapeutically or prophylactically effective amount of one or more agents counteracting the effects of the disease.

[0032] Many other uses and advantages of the present invention will be apparent to those skilled in the art upon review of the detailed description of the preferred embodiments herein. Solely for clarity of discussion, the invention is described in the sections below by way of non-limiting examples.

[0033] Description of the Files Contained on the CD-R Named CL001500CDR

[0034] The CD-R named CL001500CDR contains the following five text (ASCII) files:

[0035] 1) File SEQLIST_{—}1500.txt provides the Sequence Listing. The Sequence Listing provides the transcript sequences (SEQ ID NOS:1-284) and protein sequences (SEQ ID NOS:285-568) as shown in Table 1, and genomic sequences (SEQ ID NOS:5608-5780) as shown in Table 2, for each stenosis-associated gene that contains one or more SNPs of the present invention. Also provided in the Sequence Listing are context sequences flanking each SNP, including both transcript-based context sequences as shown in Table 1 (SEQ ID NOS:569-5607) and genomic-based context sequences as shown in Table 2 (SEQ ID NOS:5781-26,130). The context sequences generally provide 100 bp upstream (5′) and 100 bp downstream (3′) of each SNP, with the SNP in the middle of the context sequence, for a total of 200 bp of context sequence surrounding each SNP. File SEQLIST_{—}1500.txt is 23,557 KB in size.

[0036] 2) File TABLE1_{—}1500.txt provides Table 1. File TABLE1_{—}1500.txt is 4,270 KB in size.

[0037] 3) File TABLE2_{—}1500.txt provides Table 2. File TABLE2_{—}1500.txt is 19,508 KB in size.

[0038] 4) File TABLE3_{—}1500.txt provides Table 3. File TABLE3_{—}1500.txt is 34 KB in size.

[0039] 5) File TABLE4_{—}1500.txt provides Table 4. File TABLE4_{—}1500.txt is 59 KB in size.

[0040] The material contained on the CD-R labeled CL001500CDR is hereby incorporated by reference pursuant to 37 CFR 1.77(b)(4).

[0041] Description Of Table 1 And Table 2

[0042] Table 1 and Table 2 (both provided on the CD-R) disclose the SNP and associated gene/transcript/protein information of the present invention. For each gene, Table 1 and Table 2 each provide a header containing gene/transcript/protein information, followed by a transcript and protein sequence (in Table 1) or genomic sequence (in Table 2), and then SNP information regarding each SNP found in that gene/transcript.

[0043] NOTE: SNPs may be included in both Table 1 and Table 2; Table 1 presents the SNPs relative to their transcript sequences and encoded protein sequences, whereas Table 2 presents the SNPs relative to their genomic sequences (in some instances Table 2 may also include, after the last gene sequence, genomic sequences of one or more intergenic regions, as well as SNP context sequences and other SNP information for any SNPs that lie within these intergenic regions). SNPs can readily be cross-referenced between Tables based on their hCV (or, in some instances, hDV) identification numbers.

[0044] The gene/transcript/protein information includes:

[0045] a gene number (1 through n, where n=the total number of genes in the Table)

[0046] a Celera hCG and UID internal identification numbers for the gene

[0047] a Celera hCT and UID internal identification numbers for the transcript (Table 1 only)

[0048] a public Genbank accession number (e.g., RefSeq NM number) for the transcript (Table 1 only)

[0049] a Celera hCP and UID internal identification numbers for the protein encoded by the hCT transcript (Table 1 only)

[0050] a public Genbank accession number (e.g., RefSeq NP number) for the protein (Table 1 only)

[0051] an art-known gene symbol

[0052] an art-known gene/protein name

[0053] Celera genomic axis position (indicating start nucleotide position-stop nucleotide position)

[0054] the chromosome number of the chromosome on which the gene is located

[0055] an OMIM (Online Mendelian Inheritance in Man; Johns Hopkins University/NCBI) public reference number for obtaining further information regarding the medical significance of each gene

[0056] alternative gene/protein name(s) and/or symbol(s) in the OMIM entry

[0057] NOTE: Due to the presence of alternative splice forms, multiple transcript/protein entries can be provided for a single gene entry in Table 1; i.e., for a single Gene Number, multiple entries may be provided in series that differ in their transcript/protein information and sequences.

[0058] Following the gene/transcript/protein information is a transcript sequence and protein sequence (in Table 1), or a genomic sequence (in Table 2), for each gene, as follows:

[0059] transcript sequence (Table 1 only) (corresponding to SEQ ID NOS:1-284 of the Sequence Listing), with SNPs identified by their IUB codes (transcript sequences can include 5′ UTR, protein coding, and 3′ UTR regions). (NOTE: If there are differences between the nucleotide sequence of the hCT transcript and the corresponding public transcript sequence identified by the Genbank accession number, the hCT transcript sequence (and encoded protein) is provided, unless the public sequence is a RefSeq transcript sequence identified by an NM number, in which case the RefSeq NM transcript sequence (and encoded protein) is provided. However, whether the hCT transcript or RefSeq NM transcript is used as the transcript sequence, the disclosed SNPs are represented by their IUB codes within the transcript.)

[0060] the encoded protein sequence (Table 1 only) (corresponding to SEQ ID NOS:285-568 of the Sequence Listing)

[0061] the genomic sequence of the gene (Table 2 only), including 6 kb on each side of the gene boundaries (i.e., 6 kb on the 5′ side of the gene plus 6 kb on the 3′ side of the gene) (corresponding to SEQ ID NOS:5608-5780 of the Sequence Listing).

[0062] After the last gene sequence, Table 2 may include additional genomic sequences of intergenic regions (in such instances, these sequences are identified as “Intergenic region:” followed by a numerical identification number), as well as SNP context sequences and other SNP information for any SNPs that lie within each intergenic region (and such SNPs are identified as “INTERGENIC” for SNP type).

[0063] NOTE: The transcript, protein, and transcript-based SNP context sequences are provided in both Table 1 and in the Sequence Listing. The genomic and genomic-based SNP context sequences are provided in both Table 2 and in the Sequence Listing. SEQ ID NOS are indicated in Table 1 for each transcript sequence (SEQ ID NOS:1-284), protein sequence (SEQ ID NOS:285-568), and transcript-based SNP context sequence (SEQ ID NOS:569-5607), and SEQ ID NOS are indicated in Table 2 for each genomic sequence (SEQ ID NOS:5608-5780), and genomic-based SNP context sequence (SEQ ID NOS:5781-26,130).

[0064] The SNP information includes:

[0065] context sequence (taken from the transcript sequence in Table 1, and taken from the genomic sequence in Table 2) with the SNP represented by its IUB code, including 100 bp upstream (5′) of the SNP position plus 100 bp downstream (3′) of the SNP position (the transcript-based SNP context sequences in Table 1 are provided in the Sequence Listing as SEQ ID NOS:569-5607; the genomic-based SNP context sequences in Table 2 are provided in the Sequence Listing as SEQ ID NOS:5781-26,130).

[0066] Celera hCV internal identification number for the SNP (in some instances, an “hDV” number is given instead of an “hCV” number)

[0067] SNP position [position of the SNP within the given transcript sequence (Table 1) or within the given genomic sequence (Table 2)]

[0068] SNP source (may include any combination of one or more of the following five codes, depending on which internal sequencing projects and/or public databases the SNP has been observed in: “Applera”=SNP observed during the re-sequencing of genes and regulatory regions of 39 individuals, “Celera”=SNP observed during shotgun sequencing and assembly of the Celera human genome sequence, “Celera Diagnostics”=SNP observed during re-sequencing of nucleic acid samples from individuals who have stenosis or a related pathology, “dbSNP”=SNP observed in the dbSNP public database, “HGBASE”=SNP observed in the HGBASE public database, “HGMD”=SNP observed in the Human Gene Mutation Database (HGMD) public database) (NOTE: multiple “Applera” source entries for a single SNP indicate that the same SNP was covered by multiple overlapping amplification products and the re-sequencing results (e.g., observed allele counts) from each of these amplification products is being provided)

[0069] Population/allele/allele count information in the format of [population1(allele1,count|allele2,count) population2(allele1,count|allele2,count) total (allele1,total count|allele2,total count)]. The information in this field includes populations/ethnic groups in which particular SNP alleles have been observed (“cau”=Caucasian, “his”=Hispanic, “chn”=Chinese, and “afr”=African-American, “jpn”=Japanese, “ind”=Indian, “mex”=Mexican, “ain”=“American Indian, “cra”=Celera donor, “no_pop”=no population information available), identified SNP alleles, and observed allele counts (within each population group and total allele counts), where available [“−” in the allele field represents a deletion allele of an insertion/deletion (“indel”) polymorphism (in which case the corresponding insertion allele, which may be comprised of one or more nucleotides, is indicated in the allele field on the opposite side of the “|”); “−” in the count field indicates that allele count information is not available].

[0070] NOTE: For SNPs of “Applera” SNP source, genes/regulatory regions of 39 individuals (20 Caucasians and 19 African Americans) were re-sequenced and, since each SNP position is represented by two chromosomes in each individual (with the exception of SNPs on X and Y chromosomes in males, for which each SNP position is represented by a single chromosome), up to 78 chromosomes were genotyped for each SNP position. Thus, the sum of the African-American (“afr”) allele counts is up to 38, the sum of the Caucasian allele counts (“cau”) is up to 40, and the total sum of all allele counts is up to 78.

[0071] (NOTE: semicolons separate population/allele/count information corresponding to each indicated SNP source; i.e., if four SNP sources are indicated, such as “Celera”, “dbSNP”, “HGBASE”, and “HGMD”, then population/allele/count information is provided in four groups which are separated by semicolons and listed in the same order as the listing of SNP sources, with each population/allele/count information group corresponding to the respective SNP source based on order; thus, in this example, the first population/allele/count information group would correspond to the first listed SNP source (Celera) and the third population/allele/count information group separated by semicolons would correspond to the third listed SNP source (HGBASE); if population/allele/count information is not available for any particular SNP source, then a pair of semicolons is still inserted as a place-holder in order to maintain correspondence between the list of SNP sources and the corresponding listing of population/allele/count information)

[0072] SNP type (e.g., location within gene/transcript and/or predicted functional effect) [“MIS-SENSE MUTATION”=SNP causes a change in the encoded amino acid (i.e., a non-synonymous coding SNP); “SILENT MUTATION”=SNP does not cause a change in the encoded amino acid (i.e., a synonymous coding SNP); “STOP CODON MUTATION”=SNP is located in a stop codon; “NONSENSE MUTATION”=SNP creates or destroys a stop codon; “UTR 5”=SNP is located in a 5′ UTR of a transcript; “UTR 3”=SNP is located in a 3′ UTR of a transcript; “PUTATIVE UTR 5”=SNP is located in a putative 5′ UTR; “PUTATIVE UTR 3”=SNP is located in a putative 3′ UTR; “DONOR SPLICE SITE”=SNP is located in a donor splice site (5′ intron boundary); “ACCEPTOR SPLICE SITE”=SNP is located in an acceptor splice site (3′ intron boundary); “CODING REGION”=SNP is located in a protein-coding region of the transcript; “EXON”=SNP is located in an exon; “INTRON”=SNP is located in an intron; “hmCS”=SNP is located in a human-mouse conserved segment; “TFBS”=SNP is located in a transcription factor binding site; “UNKNOWN”=SNP type is not defined; “INTERGENIC”=SNP is intergenic, i.e., outside of any gene boundary]

[0073] Protein coding information (Table 1 only), where relevant, in the format of [protein SEQ ID NO:#, amino acid position, (amino acid-1, codon1) (amino acid-2, codon2)]. The information in this field includes SEQ ID NO of the encoded protein sequence, position of the amino acid residue within the protein identified by the SEQ ID NO that is encoded by the codon containing the SNP, amino acids (represented by one-letter amino acid codes) that are encoded by the alternative SNP alleles (in the case of stop codons, “X” is used for the one-letter amino acid code), and alternative codons containing the alternative SNP nucleotides which encode the amino acid residues (thus, for example, for missense mutation-type SNPs, at least two different amino acids and at least two different codons are generally indicated; for silent mutation-type SNPs, one amino acid and at least two different codons are generally indicated, etc.). In instances where the SNP is located outside of a protein-coding region (e.g., in a UTR region), “None” is indicated following the protein SEQ ID NO.

[0074] Description Of Table 3 And Table 4

[0075] Tables 3 and 4 (both provided on the CD-R) provide a list of a subset of SNPs from Table 1 (in the case of Table 3) or Table 2 (in the case of Table 4) for which the SNP source falls into one of the following three categories: 1) SNPs for which the SNP source is only “Applera” and none other, 2) SNPs for which the SNP source is only “Celera Diagnostics” and none other, and 3) SNPs for which the SNP source is both “Applera” and “Celera Diagnostics” but none other.

[0076] These SNPs have not been observed in any of the public databases (dbSNP, HGBASE, and HGMD), and were also not observed during shotgun sequencing and assembly of the Celera human genome sequence (i.e., “Celera” SNP source). Tables 3 and 4 provide the hCV identification number (or hDV identification number for SNPs having “Celera Diagnostics” SNP source) and the SEQ ID NO of the context sequence for each of these SNPs.

[0077] Description Of Table 5

[0078] Table 5 provides sequences (SEQ ID NOS:26,131-26,415) of primers that have been synthesized and used in the laboratory to carry out allele-specific PCR reactions in order to assay the SNPs disclosed in Tables 6-7 during the course of stenosis association studies.

[0079] Table 5 provides the following:

[0080] the column labeled “hCV” provides an hCV identification number for each SNP site

[0081] the column labeled “Alleles” designates the two alternative alleles at the SNP site identified by the hCV identification number that are targeted by the allele-specific primers (the allele-specific primers are shown as “Sequence A” and “Sequence B” in each row)

[0082] the column labeled “Sequence A (allele-specific primer)” provides an allele-specific primer that is specific for the first allele designated in the “Alleles” column

[0083] the column labeled “Sequence B (allele-specific primer)” provides an allele-specific primer that is specific for the second allele designated in the “Alleles” column

[0084] the column labeled “Sequence C (common primer)” provides a common primer that is used in conjunction with each of the allele-specific primers (the “Sequence A” primer and the “Sequence B” primer) and which hybridizes at a site away from the SNP position.

[0085] All primer sequences are given in the 5′ to 3′ direction.

[0086] Each of the alleles designated in the “Alleles” column matches the 3′ nucleotide of the allele-specific primer that is specific for that allele. Thus, the first allele designated in the “Alleles” column matches the 3′ nucleotide of the “Sequence A” primer, and the second allele designated in the “Alleles” column matches the 3′ nucleotide of the “Sequence B” primer.

[0087] Description Of Table 6 And Table 7

[0088] Tables 6-7 provide results of statistical analyses for SNPs disclosed in Tables 1-5 (SNPs can be cross-referenced between Tables based on their hCV identification numbers). The statistical results provide support for the association of these SNPs with coronary stenosis.

[0089] NOTE: SNPs can be cross-referenced between Tables 1-7 based on the hCV identification number of each SNP. However, six of the SNPs that are included in Tables 1-7 possess two different hCV identification numbers, as follows:

[0090] hCV1129436 is equivalent to hCV26581155

[0091] hCV15954277 is equivalent to hCV22272408

[0092] hCV16173091 is equivalent to hCV25473098

[0093] hCV16179628 is equivalent to hCV22272980

[0094] hCV16195242 is equivalent to hCV22274712

[0095] hCV7482175 is equivalent to hCV26546221

| Column heading | Definition |
|---|---|
| Marker | Internal hCV identification number for the tested SNP |
| Gene Name | HUGO gene symbol for the gene in which the SNP |
| | resides |
| Sample Set | Sample set used in the analysis (“Sample Set 1” or |
| | “Sample Set 2”) |
| p-value | The result of the asymptotic chi square test for allelic, |
| | dominant, or recessive (based on the genotype reported |
| | in the “Mode” column) genotypic association, or the |
| | results of Armitage trendtest for additive genotypic |
| | association. For SNPs for which information is |
| | provided in an “Adjust” column, it is the result of |
| | allelic, additive, dominant, or recessive (based on the |
| | genotype reported in the “Mode” column) p-value of |
| | the stratified analysis with Cochran Mantel Haenszel |
| | test. |
| OR | Allelic, dominant, recessive, or additive (based on the |
| | genotype reported in Mode column) odds ratio |
| 95% CI | 95% confidence interval of the OR reported |
| Case Freq. | Frequency of Allele1, or genotype containing Allele1, |
| | in the case group |
| Cntrl Freq. | Frequency of Allele1, or genotype containing Allele1, |
| | in the control group |
| Allele1 | Nucleotide (allele) of the tested SNP for which |
| | statistics are being reported |
| Mode | Mode of inheritance for which p-values are reported: |
| | Dom: dominant |
| | Rec: recessive |
| | Add: Additive |
| | Allelic |
| Strata | Stratum in which the association study analysis |
| | was based |
| | All: unstratified |
| | M: in male |
| | F: in female |
| | Age T1: age tertile 1 |
| | Age T2: age tertile 2 |
| | Age T3: age tertile 3 |
| | Smoke+: people who are past or current smoker |
| | Smoke−: people who never smoked |
| | MI−: people without heart attack |
| Adjust | Adjustments that were done for the Cochran Mantel |
| | Haenszel test (Indicates that the p-value was |
| | determined using a Cochran Mantel Haenszel test |
| | that was adjusted for confounders) |

### DESCRIPTION OF THE FIGURE

[0096] FIG. 1 provides a diagrammatic representation of a computer-based discovery system containing the SNP information of the present invention in computer readable form.

### DETAILED DESCRIPTION OF THE INVENTION

[0097] The present invention provides SNPs associated with stenosis, nucleic acid molecules containing SNPs, methods and reagents for the detection of the SNPs disclosed herein, uses of these SNPs for the development of detection reagents, and assays or kits that utilize such reagents. The stenosis-associated SNPs disclosed herein are useful for diagnosing, screening for, and evaluating predisposition to stenosis and related pathologies in humans. Furthermore, such SNPs and their encoded products are useful targets for the development of therapeutic agents.

[0098] A large number of SNPs have been identified from re-sequencing DNA from 39 individuals, and they are indicated as “Applera” SNP source in Tables 1-2. Their allele frequencies observed in each of the Caucasian and African-American ethnic groups are provided. Additional SNPs included herein were previously identified during shotgun sequencing and assembly of the human genome, and they are indicated as “Celera” SNP source in Tables 1-2. Furthermore, the information provided in Table 1-2, particularly the allele frequency information obtained from 39 individuals and the identification of the precise position of each SNP within each gene/transcript, allows haplotypes (i.e., groups of SNPs that are co-inherited) to be readily inferred. The present invention encompasses SNP haplotypes, as well as individual SNPs.

[0099] Thus, the present invention provides individual SNPs associated with stenosis, as well as combinations of SNPs and haplotypes in genetic regions associated with stenosis, polymorphic/variant transcript sequences (SEQ ID NOS:1-284) and genomic sequences (SEQ ID NOS:5608-5780) containing SNPs, encoded amino acid sequences (SEQ ID NOS: 285-568), and both transcript-based SNP context sequences (SEQ ID NOS: 569-5607) and genomic-based SNP context sequences (SEQ ID NOS:5781-26,130) (transcript sequences, protein sequences, and transcript-based SNP context sequences are provided in Table 1 and the Sequence Listing; genomic sequences and genomic-based SNP context sequences are provided in Table 2 and the Sequence Listing), methods of detecting these polymorphisms in a test sample, methods of determining the risk of an individual of having or developing stenosis, methods of screening for compounds useful for treating disorders associated with a variant gene/protein such as stenosis, compounds identified by these screening methods, methods of using the disclosed SNPs to select a treatment strategy, methods of treating a disorder associated with a variant gene/protein (i.e., therapeutic methods), and methods of using the SNPs of the present invention for human identification.

[0100] The present invention provides novel SNPs associated with stenosis, as well as SNPs that were previously known in the art, but were not previously known to be associated with stenosis. Accordingly, the present invention provides novel compositions and methods based on the novel SNPs disclosed herein, and also provides novel methods of using the known, but previously unassociated, SNPs in methods relating to stenosis (e.g., for diagnosing stenosis, etc.). In Tables 1-2, known SNPs are identified based on the public database in which they have been observed, which is indicated as one or more of the following SNP types: “dbSNP”=SNP observed in dbSNP, “HGBASE”=SNP observed in HGBASE, and “HGMD”=SNP observed in the Human Gene Mutation Database (HGMD). Novel SNPs for which the SNP source is only “Applera” and none other, i.e., those that have not been observed in any public databases and which were also not observed during shotgun sequencing and assembly of the Celera human genome sequence (i.e., “Celera” SNP source), are indicated in Tables 3-4.

[0101] Particular SNP alleles of the present invention can be associated with either an increased risk of having or developing stenosis, or a decreased risk of having or developing stenosis. SNP alleles that are associated with a decreased risk of having or developing stenosis may be referred to as “protective” alleles, and SNP alleles that are associated with an increased risk of having or developing stenosis may be referred to as “susceptibility” alleles or “risk factors”. Thus, whereas certain SNPs (or their encoded products) can be assayed to determine whether an individual possesses a SNP allele that is indicative of an increased risk of having or developing stenosis (i.e., a susceptibility allele), other SNPs (or their encoded products) can be assayed to determine whether an individual possesses a SNP allele that is indicative of a decreased risk of having or developing stenosis (i.e., a protective allele). Similarly, particular SNP alleles of the present invention can be associated with either an increased or decreased likelihood of responding to a particular treatment or therapeutic compound, or an increased or decreased likelihood of experiencing toxic effects from a particular treatment or therapeutic compound. The term “altered” may be used herein to encompass either of these two possibilities (e.g., an increased or a decreased risk/likelihood).

[0102] Those skilled in the art will readily recognize that nucleic acid molecules may be double-stranded molecules and that reference to a particular site on one strand refers, as well, to the corresponding site on a complementary strand. In defining a SNP position, SNP allele, or nucleotide sequence, reference to an adenine, a thymine (uridine), a cytosine, or a guanine at a particular site on one strand of a nucleic acid molecule also defines the thymine (uridine), adenine, guanine, or cytosine (respectively) at the corresponding site on a complementary strand of the nucleic acid molecule. Thus, reference may be made to either strand in order to refer to a particular SNP position, SNP allele, or nucleotide sequence. Probes and primers, may be designed to hybridize to either strand and SNP genotyping methods disclosed herein may generally target either strand. Throughout the specification, in identifying a SNP position, reference is generally made to the protein-encoding strand, only for the purpose of convenience.

[0103] References to variant peptides, polypeptides, or proteins of the present invention include peptides, polypeptides, proteins, or fragments thereof, that contain at least one amino acid residue that differs from the corresponding amino acid sequence of the art-known peptide/polypeptide/protein (the art-known protein may be interchangeably referred to as the “wild-type”, “reference”, or “normal” protein). Such variant peptides/polypeptides/proteins can result from a codon change caused by a nonsynonymous nucleotide substitution at a protein-coding SNP position (i.e., a missense mutation) disclosed by the present invention. Variant peptides/polypeptides/proteins of the present invention can also result from a nonsense mutation, i.e. a SNP that creates a premature stop codon, a SNP that generates a read-through mutation by abolishing a stop codon, or due to any SNP disclosed by the present invention that otherwise alters the structure, function/activity, or expression of a protein, such as a SNP in a regulatory region (e.g. a promoter or enhancer) or a SNP that leads to alternative or defective splicing, such as a SNP in an intron or a SNP at an exon/intron boundary. As used herein, the terms “polypeptide”, “peptide”, and “protein” are used interchangeably.

[0104] Isolated Nucleic Acid Molecules and SNP Detection Reagents & Kits

[0105] Tables 1 and 2 provide a variety of information about each SNP of the present invention that is associated with stenosis, including the transcript sequences (SEQ ID NOS:1-284), genomic sequences (SEQ ID NOS:5608-5780), and protein sequences (SEQ ID NOS:285-568) of the encoded gene products (with the SNPs indicated by IUB codes in the nucleic acid sequences). In addition, Tables 1 and 2 include SNP context sequences, which generally include 100 nucleotide upstream (5′) plus 100 nucleotides downstream (3′) of each SNP position (SEQ ID NOS:569-5607 correspond to transcript-based SNP context sequences disclosed in Table 1, and SEQ ID NOS:5781-26,130 correspond to genomic-based context sequences disclosed in Table 2), the alternative nucleotides (alleles) at each SNP position, and additional information about the variant where relevant, such as SNP type (coding, missense, splice site, UTR, etc.), human populations in which the SNP was observed, observed allele frequencies, information about the encoded protein, etc.

[0106] Isolated Nucleic Acid Molecules

[0107] The present invention provides isolated nucleic acid molecules that contain one or more SNPs disclosed Table 1 and/or Table 2. Preferred isolated nucleic acid molecules contain one or more SNPs identified in Table 3 and/or Table 4. Isolated nucleic acid molecules containing one or more SNPs disclosed in at least one of Tables 1-4 may be interchangeably referred to throughout the present text as “SNP-containing nucleic acid molecules”. Isolated nucleic acid molecules may optionally encode a full-length variant protein or fragment thereof. The isolated nucleic acid molecules of the present invention also include probes and primers (which are described in greater detail below in the section entitled “SNP Detection Reagents”), which may be used for assaying the disclosed SNPs, and isolated full-length genes, transcripts, cDNA molecules, and fragments thereof, which may be used for such purposes as expressing an encoded protein.

[0108] As used herein, an “isolated nucleic acid molecule” generally is one that contains a SNP of the present invention or one that hybridizes to such molecule such as a nucleic acid with a complementary sequence, and is separated from most other nucleic acids present in the natural source of the nucleic acid molecule. Moreover, an “isolated” nucleic acid molecule, such as a cDNA molecule containing a SNP of the present invention, can be substantially free of other cellular material, or culture medium when produced by recombinant techniques, or chemical precursors or other chemicals when chemically synthesized. A nucleic acid molecule can be fused to other coding or regulatory sequences and still be considered “isolated”. Nucleic acid molecules present in non-human transgenic animals, which do not naturally occur in the animal, are also considered “isolated”. For example, recombinant DNA molecules contained in a vector are considered “isolated”. Further examples of “isolated” DNA molecules include recombinant DNA molecules maintained in heterologous host cells, and purified (partially or substantially) DNA molecules in solution. Isolated RNA molecules include in vivo or in vitro RNA transcripts of the isolated SNP-containing DNA molecules of the present invention. Isolated nucleic acid molecules according to the present invention further include such molecules produced synthetically.

[0109] Generally, an isolated SNP-containing nucleic acid molecule comprises one or more SNP positions disclosed by the present invention with flanking nucleotide sequences on either side of the SNP positions. A flanking sequence can include nucleotide residues that are naturally associated with the SNP site and/or heterologous nucleotide sequences. Preferably the flanking sequence is up to about 500, 300, 100, 60, 50, 30, 25, 20, 15, 10, 8, or 4 nucleotides (or any other length in-between) on either side of a SNP position, or as long as the full-length gene or entire protein-coding sequence (or any portion thereof such as an exon), especially if the SNP-containing nucleic acid molecule is to be used to produce a protein or protein fragment.

[0110] For full-length genes and entire protein-coding sequences, a SNP flanking sequence can be, for example, up to about 5 KB, 4 KB, 3 KB, 2 KB, 1 KB on either side of the SNP. Furthermore, in such instances, the isolated nucleic acid molecule comprises exonic sequences (including protein-coding and/or non-coding exonic sequences), but may also include intronic sequences. Thus, any protein coding sequence may be either contiguous or separated by introns. The important point is that the nucleic acid is isolated from remote and unimportant flanking sequences and is of appropriate length such that it can be subjected to the specific manipulations or uses described herein such as recombinant protein expression, preparation of probes and primers for assaying the SNP position, and other uses specific to the SNP-containing nucleic acid sequences.

[0111] An isolated SNP-containing nucleic acid molecule can comprise, for example, a full-length gene or transcript, such as a gene isolated from genomic DNA (e.g., by cloning or PCR amplification), a cDNA molecule, or an mRNA transcript molecule. Polymorphic transcript sequences are provided in Table 1 and in the Sequence Listing (SEQ ID NOS:1-284), and polymorphic genomic sequences are provided in Table 2 and in the Sequence Listing (SEQ ID NOS:5608-5780). Furthermore, fragments of such full-length genes and transcripts that contain one or more SNPs disclosed herein are also encompassed by the present invention, and such fragments may be used, for example, to express any part of a protein, such as a particular functional domain or an antigenic epitope.

[0112] Thus, the present invention also encompasses fragments of the nucleic acid sequences provided in Tables 1-2 (transcript sequences are provided in Table 1 as SEQ ID NOS:1-284, genomic sequences are provided in Table 2 as SEQ ID NOS:5608-5780, transcript-based SNP context sequences are provided in Table 1 as SEQ ID NO:569-5607, and genomic-based SNP context sequences are provided in Table 2 as SEQ ID NO:5781-26,130) and their complements. A fragment typically comprises a contiguous nucleotide sequence at least about 8 or more nucleotides, more preferably at least about 12 or more nucleotides, and even more preferably at least about 16 or more nucleotides. Further, a fragment could comprise at least about 18, 20, 22, 25, 30, 40, 50, 60, 100, 250 or 500 (or any other number in-between) nucleotides in length. The length of the fragment will be based on its intended use. For example, the fragment can encode epitope-bearing regions of a variant peptide or regions of a variant peptide that differ from the normal/wild-type protein, or can be useful as a polynucleotide probe or primer. Such fragments can be isolated using the nucleotide sequences provided in Table 1 and/or Table 2 for the synthesis of a polynucleotide probe. A labeled probe can then be used, for example, to screen a cDNA library, genomic DNA library, or mRNA to isolate nucleic acid corresponding to the coding region. Further, primers can be used in amplification reactions, such as for purposes of assaying one or more SNPs sites or for cloning specific regions of a gene.

[0113] An isolated nucleic acid molecule of the present invention further encompasses a SNP-containing polynucleotide that is the product of any one of a variety of nucleic acid amplification methods, which are used to increase the copy numbers of a polynucleotide of interest in a nucleic acid sample. Such amplification methods are well known in the art, and they include but are not limited to, polymerase chain reaction (PCR) (U.S. Pat. Nos. 4,683,195; and 4,683,202; PCR Technology: Principles and Applications for DNA Amplification, ed. H. A. Erlich, Freeman Press, NY, N.Y., 1992), ligase chain reaction (LCR) (Wu and Wallace, Genomics 4:560, 1989; Landegren et al., Science 241:1077, 1988), strand displacement amplification (SDA) (U.S. Pat. Nos. 5,270,184; and 5,422,252), transcription-mediated amplification (TMA) (U.S. Pat. No. 5,399,491), linked linear amplification (LLA) (U.S. Pat. No. 6,027,923), and the like, and isothermal amplification methods such as nucleic acid sequence based amplification (NASBA), and self-sustained sequence replication (Guatelli et al., Proc. Natl. Acad. Sci. USA 87: 1874, 1990). Based on such methodologies, a person skilled in the art can readily design primers in any suitable regions 5′ and 3′ to a SNP disclosed herein. Such primers may be used to amplify DNA of any length so long that it contains the SNP of interest in its sequence.

[0114] As used herein, an “amplified polynucleotide” of the invention is a SNP-containing nucleic acid molecule whose amount has been increased at least two fold by any nucleic acid amplification method performed in vitro as compared to its starting amount in a test sample. In other preferred embodiments, an amplified polynucleotide is the result of at least ten fold, fifty fold, one hundred fold, one thousand fold, or even ten thousand fold increase as compared to its starting amount in a test sample. In a typical PCR amplification, a polynucleotide of interest is often amplified at least fifty thousand fold in amount over the unamplified genomic DNA, but the precise amount of amplification needed for an assay depends on the sensitivity of the subsequent detection method used.

[0115] Generally, an amplified polynucleotide is at least about 16 nucleotides in length. More typically, an amplified polynucleotide is at least about 20 nucleotides in length. In a preferred embodiment of the invention, an amplified polynucleotide is at least about 30 nucleotides in length. In a more preferred embodiment of the invention, an amplified polynucleotide is at least about 32, 40, 45, 50, or 60 nucleotides in length. In yet another preferred embodiment of the invention, an amplified polynucleotide is at least about 100, 200, or 300 nucleotides in length. While the total length of an amplified polynucleotide of the invention can be as long as an exon, an intron or the entire gene where the SNP of interest resides, an amplified product is typically no greater than about 1,000 nucleotides in length (although certain amplification methods may generate amplified products greater than 1000 nucleotides in length). More preferably, an amplified polynucleotide is not greater than about 600 nucleotides in length. It is understood that irrespective of the length of an amplified polynucleotide, a SNP of interest may be located anywhere along its sequence.

[0116] In a specific embodiment of the invention, the amplified product is at least about 0.201 nucleotides in length, comprises one of the transcript-based context sequences or the genomic-based context sequences shown in Tables 1-2. Such a product may have additional sequences on its 5′ end or 3′ end or both. In another embodiment, the amplified product is about 101 nucleotides in length, and it contains a SNP disclosed herein. Preferably, the SNP is located at the middle of the amplified product (e.g., at position 101 in an amplified product that is 201 nucleotides in length, or at position 51 in an amplified product that is 101 nucleotides in length), or within 1, 2, 3, 4, 5, 6, 7, 8, 9, 10, 12, 15, or 20 nucleotides from the middle of the amplified product (however, as indicated above, the SNP of interest may be located anywhere along the length of the amplified product).

[0117] The present invention provides isolated nucleic acid molecules that comprise, consist of, or consist essentially of one or more polynucleotide sequences that contain one or more SNPs disclosed herein, complements thereof, and SNP-containing fragments thereof.

[0118] Accordingly, the present invention provides nucleic acid molecules that consist of any of the nucleotide sequences shown in Table 1 and/or Table 2 (transcript sequences are provided in Table 1 as SEQ ID NOS:1-284, genomic sequences are provided in Table 2 as SEQ ID NOS:5608-5780, transcript-based SNP context sequences are provided in Table 1 as SEQ ID NO:569-5607, and genomic-based SNP context sequences are provided in Table 2 as SEQ ID NO:5781-26,130), or any nucleic acid molecule that encodes any of the variant proteins provided in Table 1 (SEQ ID NOS:285-568). A nucleic acid molecule consists of a nucleotide sequence when the nucleotide sequence is the complete nucleotide sequence of the nucleic acid molecule.

[0119] The present invention further provides nucleic acid molecules that consist essentially of any of the nucleotide sequences shown in Table 1 and/or Table 2 (transcript sequences are provided in Table 1 as SEQ ID NOS:1-284, genomic sequences are provided in Table 2 as SEQ ID NOS:5608-5780, transcript-based SNP context sequences are provided in Table 1 as SEQ ID NO:569-5607, and genomic-based SNP context sequences are provided in Table 2 as SEQ ID NO:5781-26,130), or any nucleic acid molecule that encodes any of the variant proteins provided in Table 1 (SEQ ID NOS:285-568). A nucleic acid molecule consists essentially of a nucleotide sequence when such a nucleotide sequence is present with only a few additional nucleotide residues in the final nucleic acid molecule.

[0120] The present invention further provides nucleic acid molecules that comprise any of the nucleotide sequences shown in Table 1 and/or Table 2 or a SNP-containing fragment thereof (transcript sequences are provided in Table 1 as SEQ ID NOS:1-284, genomic sequences are provided in Table 2 as SEQ ID NOS:5608-5780, transcript-based SNP context sequences are provided in Table 1 as SEQ ID NO:569-5607, and genomic-based SNP context sequences are provided in Table 2 as SEQ ID NO:5781-26,130), or any nucleic acid molecule that encodes any of the variant proteins provided in Table 1 (SEQ ID NOS:285-568). A nucleic acid molecule comprises a nucleotide sequence when the nucleotide sequence is at least part of the final nucleotide sequence of the nucleic acid molecule. In such a fashion, the nucleic acid molecule can be only the nucleotide sequence or have additional nucleotide residues, such as residues that are naturally associated with it or heterologous nucleotide sequences. Such a nucleic acid molecule can have one to a few additional nucleotides or can comprise many more additional nucleotides. A brief description of how various types of these nucleic acid molecules can be readily made and isolated is provided below, and such techniques are well known to those of ordinary skill in the art (Sambrook and Russell, 2000, Molecular Cloning: A Laboratory Manual, Cold Spring Harbor Press, NY).

[0121] The isolated nucleic acid molecules can encode mature proteins plus additional amino or carboxyl-terminal amino acids or both, or amino acids interior to the mature peptide (when the mature form has more than one peptide chain, for instance). Such sequences may play a role in processing of a protein from precursor to a mature form, facilitate protein trafficking, prolong or shorten protein half-life, or facilitate manipulation of a protein for assay or production. As generally is the case in situ, the additional amino acids may be processed away from the mature protein by cellular enzymes.

[0122] Thus, the isolated nucleic acid molecules include, but are not limited to, nucleic acid molecules having a sequence encoding a peptide alone, a sequence encoding a mature peptide and additional coding sequences such as a leader or secretory sequence (e.g., a pre-pro or pro-protein sequence), a sequence encoding a mature peptide with or without additional coding sequences, plus additional non-coding sequences, for example introns and non-coding 5′ and 3′ sequences such as transcribed but untranslated sequences that play a role in, for example, transcription, mRNA processing (including splicing and polyadenylation signals), ribosome binding, and/or stability of mRNA. In addition, the nucleic acid molecules may be fused to heterologous marker sequences encoding, for example, a peptide that facilitates purification.

[0123] Isolated nucleic acid molecules can be in the form of RNA, such as mRNA, or in the form DNA, including cDNA and genomic DNA, which may be obtained, for example, by molecular cloning or produced by chemical synthetic techniques or by a combination thereof (Sambrook and Russell, 2000, Molecular Cloning: A Laboratory Manual, Cold Spring Harbor Press, NY). Furthermore, isolated nucleic acid molecules, particularly SNP detection reagents such as probes and primers, can also be partially or completely in the form of one or more types of nucleic acid analogs, such as peptide nucleic acid (PNA) (U.S. Pat. Nos. 5,539,082; 5,527,675; 5,623,049; 5,714,331). The nucleic acid, especially DNA, can be double-stranded or single-stranded. Single-stranded nucleic acid can be the coding strand (sense strand) or the complementary non-coding strand (anti-sense strand). DNA, RNA, or PNA segments can be assembled, for example, from fragments of the human genome (in the case of DNA or RNA) or single nucleotides, short oligonucleotide linkers, or from a series of oligonucleotides, to provide a synthetic nucleic acid molecule. Nucleic acid molecules can be readily synthesized using the sequences provided herein as a reference; oligonucleotide and PNA oligomer synthesis techniques are well known in the art (see, e.g., Corey, “Peptide nucleic acids: expanding the scope of nucleic acid recognition”, Trends Biotechnol. 1997 June; 15(6):224-9, and Hyrup et al., “Peptide nucleic acids (PNA): synthesis, properties and potential applications”, Bioorg Med Chem. 1996 January; 4(1):5-23). Furthermore, large-scale automated oligonucleotide/PNA synthesis (including synthesis on an array or bead surface or other solid support) can readily be accomplished using commercially available nucleic acid synthesizers, such as the Applied Biosystems (Foster City, Calif.) 3900 High-Throughput DNA Synthesizer or Expedite 8909 Nucleic Acid Synthesis System, and the sequence information provided herein.

[0124] The present invention encompasses nucleic acid analogs that contain modified, synthetic, or non-naturally occurring nucleotides or structural elements or other alternative/modified nucleic acid chemistries known in the art. Such nucleic acid analogs are useful, for example, as detection reagents (e.g., primers/probes) for detecting one or more SNPs identified in Table 1 and/or Table 2. Furthermore, kits/systems (such as beads, arrays, etc.) that include these analogs are also encompassed by the present invention. For example, PNA oligomers that are based on the polymorphic sequences of the present invention are specifically contemplated. PNA oligomers are analogs of DNA in which the phosphate backbone is replaced with a peptide-like backbone (Lagriffoul et al., Bioorganic & Medicinal Chemistry Letters, 4: 1081-1082 (1994), Petersen et al., Bioorganic & Medicinal Chemistry Letters, 6: 793-796 (1996), Kumar et al., Organic Letters 3(9): 1269-1272 (2001), WO96/04000). PNA hybridizes to complementary RNA or DNA with higher affinity and specificity than conventional oligonucleotides and oligonucleotide analogs. The properties of PNA enable novel molecular biology and biochemistry applications unachievable with traditional oligonucleotides and peptides.

[0125] Additional examples of nucleic acid modifications that improve the binding properties and/or stability of a nucleic acid include the use of base analogs such as inosine, intercalators (U.S. Pat. No. 4,835,263) and the minor groove binders (U.S. Pat. No. 5,801,115). Thus, references herein to nucleic acid molecules, SNP-containing nucleic acid molecules, SNP detection reagents (e.g., probes and primers), oligonucleotides/polynucleotides include PNA oligomers and other nucleic acid analogs. Other examples of nucleic acid analogs and alternative/modified nucleic acid chemistries known in the art are described in Current Protocols in Nucleic Acid Chemistry, John Wiley & Sons, N.Y. (2002).

[0126] The present invention further provides nucleic acid molecules that encode fragments of the variant polypeptides disclosed herein as well as nucleic acid molecules that encode obvious variants of such variant polypeptides. Such nucleic acid molecules may be naturally occurring, such as paralogs (different locus) and orthologs (different organism), or may be constructed by recombinant DNA methods or by chemical synthesis. Non-naturally occurring variants may be made by mutagenesis techniques, including those applied to nucleic acid molecules, cells, or organisms. Accordingly, the variants can contain nucleotide substitutions, deletions, inversions and insertions (in addition to the SNPs disclosed in Tables 1-2). Variation can occur in either or both the coding and non-coding regions. The variations can produce conservative and/or non-conservative amino acid substitutions.

[0127] Further variants of the nucleic acid molecules disclosed in Tables 1-2, such as naturally occurring allelic variants (as well as orthologs and paralogs) and synthetic variants produced by mutagenesis techniques, can be identified and/or produced using methods well known in the art. Such further variants can comprise a nucleotide sequence that shares at least 70-80%, 80-85%, 85-90%, 91%, 92%, 93%, 94%, 95%, 96%, 97%, 98%, or 99% sequence identity with a nucleic acid sequence disclosed in Table 1 and/or Table 2 (or a fragment thereof) and that includes a novel SNP allele disclosed in Table 1 and/or Table 2. Further, variants can comprise a nucleotide sequence that encodes a polypeptide that shares at least 70-80%, 80-85%, 85-90%, 91%, 92%, 93%, 94%, 95%, 96%, 97%, 98%, or 99% sequence identity with a polypeptide sequence disclosed in Table 1 (or a fragment thereof) and that includes a novel SNP allele disclosed in Table 1 and/or Table 2. Thus, the present invention specifically contemplates isolated nucleic acid molecule that have a certain degree of sequence variation compared with the sequences shown in Tables 1-2, but that contain a novel SNP allele disclosed herein. In other words, as long as an isolated nucleic acid molecule contains a novel SNP allele disclosed herein, other portions of the nucleic acid molecule that flank the novel SNP allele can vary to some degree from the specific transcript, genomic, and context sequences shown in Tables 1-2, and can encode a polypeptide that varies to some degree from the specific polypeptide sequences shown in Table 1.

[0128] To determine the percent identity of two amino acid sequences or two nucleotide sequences of two molecules that share sequence homology, the sequences are aligned for optimal comparison purposes (e.g., gaps can be introduced in one or both of a first and a second amino acid or nucleic acid sequence for optimal alignment and non-homologous sequences can be disregarded for comparison purposes). In a preferred embodiment, at least 30%, 40%, 50%, 60%, 70%, 80%, or 90% or more of the length of a reference sequence is aligned for comparison purposes. The amino acid residues or nucleotides at corresponding amino acid positions or nucleotide positions are then compared. When a position in the first sequence is occupied by the same amino acid residue or nucleotide as the corresponding position in the second sequence, then the molecules are identical at that position (as used herein, amino acid or nucleic acid “identity” is equivalent to amino acid or nucleic acid “homology”). The percent identity between the two sequences is a function of the number of identical positions shared by the sequences, taking into account the number of gaps, and the length of each gap, which need to be introduced for optimal alignment of the two sequences.

[0129] The comparison of sequences and determination of percent identity between two sequences can be accomplished using a mathematical algorithm. (Computational Molecular Biology, Lesk, A. M., ed., Oxford University Press, New York, 1988; Biocomputing: Informatics and Genome Projects, Smith, D. W., ed., Academic Press, New York, 1993; Computer Analysis of Sequence Data, Part 1, Griffin, A. M., and Griffin, H. G., eds., Humana Press, New Jersey, 1994; Sequence Analysis in Molecular Biology, von Heinje, G., Academic Press, 1987; and Sequence Analysis Primer, Gribskov, M. and Devereux, J., eds., M Stockton Press, New York, 1991). In a preferred embodiment, the percent identity between two amino acid sequences is determined using the Needleman and Wunsch algorithm (J. Mol. Biol. (48):444-453 (1970)) which has been incorporated into the GAP program in the GCG software package, using either a Blossom 62 matrix or a PAM250 matrix, and a gap weight of 16, 14, 12, 10, 8, 6, or 4 and a length weight of 1, 2, 3, 4, 5, or 6.

[0130] In yet another preferred embodiment, the percent identity between two nucleotide sequences is determined using the GAP program in the GCG software package (Devereux, J., et al., Nucleic Acids Res. 12(1):387 (1984)), using a NWSgapdna.CMP matrix and a gap weight of 40, 50, 60, 70, or 80 and a length weight of 1, 2, 3, 4, 5, or 6. In another embodiment, the percent identity between two amino acid or nucleotide sequences is determined using the algorithm of E. Myers and W. Miller (CABIOS, 4:11-17 (1989)) which has been incorporated into the ALIGN program (version 2.0), using a PAM120 weight residue table, a gap length penalty of 12, and a gap penalty of 4.

[0131] The nucleotide and amino acid sequences of the present invention can further be used as a “query sequence” to perform a search against sequence databases to, for example, identify other family members or related sequences. Such searches can be performed using the NBLAST and XBLAST programs (version 2.0) of Altschul, et al. (J. Mol. Biol. 215:403-10 (1990)). BLAST nucleotide searches can be performed with the NBLAST program, score=100, wordlength=12 to obtain nucleotide sequences homologous to the nucleic acid molecules of the invention. BLAST protein searches can be performed with the XBLAST program, score=50, wordlength=3 to obtain amino acid sequences homologous to the proteins of the invention. To obtain gapped alignments for comparison purposes, Gapped BLAST can be utilized as described in Altschul et al. (Nucleic Acids Res. 25(17):3389-3402 (1997)). When utilizing BLAST and gapped BLAST programs, the default parameters of the respective programs (e.g., XBLAST and NBLAST) can be used. In addition to BLAST, examples of other search and sequence comparison programs used in the art include, but are not limited to, FASTA (Pearson, Methods Mol. Biol. 25, 365-389 (1994)) and KERR (Dufresne et al., Nat Biotechnol 2002 December; 20(12): 1269-71). For further information regarding bioinformatics techniques, see Current Protocols in Bioinformatics, John Wiley & Sons, Inc., N.Y.

[0132] The present invention further provides non-coding fragments of the nucleic acid molecules disclosed in Table 1 and/or Table 2. Preferred non-coding fragments include, but are not limited to, promoter sequences, enhancer sequences, intronic sequences, 5′ untranslated regions (UTRs), 3′ untranslated regions, gene modulating sequences and gene termination sequences. Such fragments are useful, for example, in controlling heterologous gene expression and in developing screens to identify gene-modulating agents.

[0133] SNP Detection Reagents

[0134] In a specific aspect of the present invention, the SNPs disclosed in Table 1 and/or Table 2, and their associated transcript sequences (provided in Table 1 as SEQ ID NOS:1-284), genomic sequences (provided in Table 2 as SEQ ID NOS:5608-5780), and context sequences (transcript-based context sequences are provided in Table 1 as SEQ ID NOS:569-5607; genomic-based context sequences are provided in Table 2 as SEQ ID NOS:5781-26,130), can be used for the design of SNP detection reagents. As used herein, a “SNP detection reagent” is a reagent that specifically detects a specific target SNP position disclosed herein, and that is preferably specific for a particular nucleotide (allele) of the target SNP position (i.e., the detection reagent preferably can differentiate between different alternative nucleotides at a target SNP position, thereby allowing the identity of the nucleotide present at the target SNP position to be determined). Typically, such detection reagent hybridizes to a target SNP-containing nucleic acid molecule by complementary base-pairing in a sequence specific manner, and discriminates the target variant sequence from other nucleic acid sequences such as an art-known form in a test sample. An example of a detection reagent is a probe that hybridizes to a target nucleic acid containing one or more of the SNPs provided in Table 1 and/or Table 2. In a preferred embodiment, such a probe can differentiate between nucleic acids having a particular nucleotide (allele) at a target SNP position from other nucleic acids that have a different nucleotide at the same target SNP position. In addition, a detection reagent may hybridize to a specific region 5′ and/or 3′ to a SNP position, particularly a region corresponding to the context sequences provided in Table 1 and/or Table 2 (transcript-based context sequences are provided in Table 1 as SEQ ID NOS:569-5607; genomic-based context sequences are provided in Table 2 as SEQ ID NOS:5781-26,130). Another example of a detection reagent is a primer which acts as an initiation point of nucleotide extension along a complementary strand of a target polynucleotide. The SNP sequence information provided herein is also useful for designing primers, e.g. allele-specific primers, to amplify (e.g., using PCR) any SNP of the present invention.

[0135] In one preferred embodiment of the invention, a SNP detection reagent is an isolated or synthetic DNA or RNA polynucleotide probe or primer or PNA oligomer, or a combination of DNA, RNA and/or PNA, that hybridizes to a segment of a target nucleic acid molecule containing a SNP identified in Table 1 and/or Table 2. A detection reagent in the form of a polynucleotide may optionally contain modified base analogs, intercalators or minor groove binders. Multiple detection reagents such as probes may be, for example, affixed to a solid support (e.g., arrays or beads) or supplied in solution (e.g., probe/primer sets for enzymatic reactions such as PCR, RT-PCR, TaqMan assays, or primer-extension reactions) to form a SNP detection kit.

[0136] A probe or primer typically is a substantially purified oligonucleotide or PNA oligomer. Such oligonucleotide typically comprises a region of complementary nucleotide sequence that hybridizes under stringent conditions to at least about 8, 10, 12, 16, 18, 20, 22, 25, 30, 40, 50, 60, 100 (or any other number in-between) or more consecutive nucleotides in a target nucleic acid molecule. Depending on the particular assay, the consecutive nucleotides can either include the target SNP position, or be a specific region in close enough proximity 5′ and/or 3′ to the SNP position to carry out the desired assay.

[0137] Other preferred primer and probe sequences can readily be determined using the transcript sequences (SEQ ID NOS:1-284), genomic sequences (SEQ ID NOS:5608-5.780), and SNP context sequences (transcript-based context sequences are provided in Table 1 as SEQ ID NOS:569-5607; genomic-based context sequences are provided in Table 2 as SEQ ID NOS:5781-26,130) disclosed in the Sequence Listing and in Tables 1-2. It will be apparent to one of skill in the art that such primers and probes are directly useful as reagents for genotyping the SNPs of the present invention, and can be incorporated into any kit/system format.

[0138] In order to produce a probe or primer specific for a target SNP-containing sequence, the gene/transcript and/or context sequence surrounding the SNP of interest is typically examined using a computer algorithm which starts at the 5′ or at the 3′ end of the nucleotide sequence. Typical algorithms will then identify oligomers of defined length that are unique to the gene/SNP context sequence, have a GC content within a range suitable for hybridization, lack predicted secondary structure that may interfere with hybridization, and/or possess other desired characteristics or that lack other undesired characteristics.

[0139] A primer or probe of the present invention is typically at least about 8 nucleotides in length. In one embodiment of the invention, a primer or a probe is at least about 10 nucleotides in length. In a preferred embodiment, a primer or a probe is at least about 12 nucleotides in length. In a more preferred embodiment, a primer or probe is at least about 16, 17, 18, 19, 20, 21, 22, 23, 24 or 25 nucleotides in length. While the maximal length of a probe can be as long as the target sequence to be detected, depending on the type of assay in which it is employed, it is typically less than about 50, 60, 65, or 70 nucleotides in length. In the case of a primer, it is typically less than about 30 nucleotides in length. In a specific preferred embodiment of the invention, a primer or a probe is within the length of about 18 and about 28 nucleotides. However, in other embodiments, such as nucleic acid arrays and other embodiments in which probes are affixed to a substrate, the probes can be longer, such as on the order of 30-70, 75, 80, 90, 100, or more nucleotides in length (see the section below entitled “SNP Detection Kits and Systems”).

[0140] For analyzing SNPs, it may be appropriate to use oligonucleotides specific for alternative SNP alleles. Such oligonucleotides which detect single nucleotide variations in target sequences may be referred to by such terms as “allele-specific oligonucleotides”, “allele-specific probes”, or “allele-specific primers”. The design and use of allele-specific probes for analyzing polymorphisms is described in, e.g., Mutation Detection A Practical Approach, ed. Cotton et al. Oxford University Press, 1998; Saiki et al., Nature 324, 163-166 (1986); Dattagupta, EP235,726; and Saiki, WO 89/11548.

[0141] While the design of each allele-specific primer or probe depends on variables such as the precise composition of the nucleotide sequences flanking a SNP position in a target nucleic acid molecule, and the length of the primer or probe, another factor in the use of primers and probes is the stringency of the condition under which the hybridization between the probe or primer and the target sequence is performed. Higher stringency conditions utilize buffers with lower ionic strength and/or a higher reaction temperature, and tend to require a more perfect match between probe/primer and a target sequence in order to form a stable duplex. If the stringency is too high, however, hybridization may not occur at all. In contrast, lower stringency conditions utilize buffers with higher ionic strength and/or a lower reaction temperature, and permit the formation of stable duplexes with more mismatched bases between a probe/primer and a target sequence. By way of example and not limitation, exemplary conditions for high stringency hybridization conditions using an allele-specific probe are as follows: Prehybridization with a solution containing 5×standard saline phosphate EDTA (SSPE), 0.5% NaDodSO₄ (SDS) at 55° C., and incubating probe with target nucleic acid molecules in the same solution at the same temperature, followed by washing with a solution containing 2×SSPE, and 0.1% SDS at 55° C. or room temperature.

[0142] Moderate stringency hybridization conditions may be used for allele-specific primer extension reactions with a solution containing, e.g., about 50 mM KCl at about 46° C. Alternatively, the reaction may be carried out at an elevated temperature such as 60° C. In another embodiment, a moderately stringent hybridization condition suitable for oligonucleotide ligation assay (OLA) reactions wherein two probes are ligated if they are completely complementary to the target sequence may utilize a solution of about 100 mM KCl at a temperature of 46° C.

[0143] In a hybridization-based assay, allele-specific probes can be designed that hybridize to a segment of target DNA from one individual but do not hybridize to the corresponding segment from another individual due to the presence of different polymorphic forms (e.g., alternative SNP alleles/nucleotides) in the respective DNA segments from the two individuals. Hybridization conditions should be sufficiently stringent that there is a significant detectable difference in hybridization intensity between alleles, and preferably an essentially binary response, whereby a probe hybridizes to only one of the alleles or significantly more strongly to one allele. While a probe may be designed to hybridize to a target sequence that contains a SNP site such that the SNP site aligns anywhere along the sequence of the probe, the probe is preferably designed to hybridize to a segment of the target sequence such that the SNP site aligns with a central position of the probe (e.g., a position within the probe that is at least three nucleotides from either end of the probe). This design of probe generally achieves good discrimination in hybridization between different allelic forms.

[0144] In another embodiment, a probe or primer may be designed to hybridize to a segment of target DNA such that the SNP aligns with either the 5′ most end or the 3′ most end of the probe or primer. In a specific preferred embodiment which is particularly suitable for use in a oligonucleotide ligation assay (U.S. Pat. No. 4,988,617), the 3′ most nucleotide of the probe aligns with the SNP position in the target sequence.

[0145] Oligonucleotide probes and primers may be prepared by methods well known in the art. Chemical synthetic methods include, but are limited to, the phosphotriester method described by Narang et al., 1979, Methods in Enzymology 68:90; the phosphodiester method described by Brown et al., 1979, Methods in Enzymology 68:109, the diethylphosphoamidate method described by Beaucage et al., 1981, Tetrahedron Letters 22:1859; and the solid support method described in U.S. Pat. No. 4,458,066.

[0146] Allele-specific probes are often used in pairs (or, less commonly, in sets of 3 or 4, such as if a SNP position is known to have 3 or 4 alleles, respectively, or to assay both strands of a nucleic acid molecule for a target SNP allele), and such pairs may be identical except for a one nucleotide mismatch that represents the allelic variants at the SNP position.

[0147] Commonly, one member of a pair perfectly matches a reference form of a target sequence that has a more common SNP allele (i.e., the allele that is more frequent in the target population) and the other member of the pair perfectly matches a form of the target sequence that has a less common SNP allele (i.e., the allele that is rarer in the target population). In the case of an array, multiple pairs of probes can be immobilized on the same support for simultaneous analysis of multiple different polymorphisms.

[0148] In one type of PCR-based assay, an allele-specific primer hybridizes to a region on a target nucleic acid molecule that overlaps a SNP position and only primes amplification of an allelic form to which the primer exhibits perfect complementarity (Gibbs, 1989, Nucleic Acid Res. 17 2427-2448). Typically, the primer's 3′-most nucleotide is aligned with and complementary to the SNP position of the target nucleic acid molecule. This primer is used in conjunction with a second primer that hybridizes at a distal site. Amplification proceeds from the two primers, producing a detectable product that indicates which allelic form is present in the test sample. A control is usually performed with a second pair of primers, one of which shows a single base mismatch at the polymorphic site and the other of which exhibits perfect complementarity to a distal site. The single-base mismatch prevents amplification or substantially reduces amplification efficiency, so that either no detectable product is formed or it is formed in lower amounts or at a slower pace. The method generally works most effectively when the mismatch is at the 3′-most position of the oligonucleotide (i.e., the 3′-most position of the oligonucleotide aligns with the target SNP position) because this position is most destabilizing to elongation from the primer (see, e.g., WO 93/22456). This PCR-based assay can be utilized as part of the TaqMan assay, described below.

[0149] In a specific embodiment of the invention, a primer of the invention contains a sequence substantially complementary to a segment of a target SNP-containing nucleic acid molecule except that the primer has a mismatched nucleotide in one of the three nucleotide positions at the 3′-most end of the primer, such that the mismatched nucleotide does not base pair with a particular allele at the SNP site. In a preferred embodiment, the mismatched nucleotide in the primer is the second from the last nucleotide at the 3′-most position of the primer. In a more preferred embodiment, the mismatched nucleotide in the primer is the last nucleotide at the 3′-most position of the primer.

[0150] In another embodiment of the invention, a SNP detection reagent of the invention is labeled with a fluorogenic reporter dye that emits a detectable signal. While the preferred reporter dye is a fluorescent dye, any reporter dye that can be attached to a detection reagent such as an oligonucleotide probe or primer is suitable for use in the invention. Such dyes include, but are not limited to, Acridine, AMCA, BODIPY, Cascade Blue, Cy2, Cy3, Cy5, Cy7, Dabcyl, Edans, Eosin, Erythrosin, Fluorescein, 6-Fam, Tet, Joe, Hex, Oregon Green, Rhodamine, Rhodol Green, Tamra, Rox, and Texas Red.

[0151] In yet another embodiment of the invention, the detection reagent may be further labeled with a quencher dye such as Tamra, especially when the reagent is used as a self-quenching probe such as a TaqMan (U.S. Pat. Nos. 5,210,015 and 5,538,848) or Molecular Beacon probe (U.S. Pat. Nos. 5,118,801 and 5,312,728), or other stemless or linear beacon probe (Livak et al., 1995, PCR Method Appl. 4:357-362; Tyagi et al., 1996, Nature Biotechnology 14: 303-308; Nazarenko et al., 1997, Nucl. Acids Res. 25:2516-2521; U.S. Pat. Nos. 5,866,336 and 6,117,635).

[0152] The detection reagents of the invention may also contain other labels, including but not limited to, biotin for streptavidin binding, hapten for antibody binding, and oligonucleotide for binding to another complementary oligonucleotide such as pairs of zipcodes.

[0153] The present invention also contemplates reagents that do not contain (or that are complementary to) a SNP nucleotide identified herein but that are used to assay one or more SNPs disclosed herein. For example, primers that flank, but do not hybridize directly to a target SNP position provided herein are useful in primer extension reactions in which the primers hybridize to a region adjacent to the target SNP position (i.e., within one or more nucleotides from the target SNP site). During the primer extension reaction, a primer is typically not able to extend past a target SNP site if a particular nucleotide (allele) is present at that target SNP site, and the primer extension product can readily be detected in order to determine which SNP allele is present at the target SNP site. For example, particular ddNTPs are typically used in the primer extension reaction to terminate primer extension once a ddNTP is incorporated into the extension product (a primer extension product which includes a ddNTP at the 3′-most end of the primer extension product, and in which the ddNTP corresponds to a SNP disclosed herein, is a composition that is encompassed by the present invention). Thus, reagents that bind to a nucleic acid molecule in a region adjacent to a SNP site, even though the bound sequences do not necessarily include the SNP site itself, are also encompassed by the present invention.

[0154] SNP Detection Kits and Systems

[0155] A person skilled in the art will recognize that, based on the SNP and associated sequence information disclosed herein, detection reagents can be developed and used to assay any SNP of the present invention individually or in combination, and such detection reagents can be readily incorporated into one of the established kit or system formats which are well known in the art. The terms “kits” and “systems”, as used herein in the context of SNP detection reagents, are intended to refer to such things as combinations of multiple SNP detection reagents, or one or more SNP detection reagents in combination with one or more other types of elements or components (e.g., other types of biochemical reagents, containers, packages such as packaging intended for commercial sale, substrates to which SNP detection reagents are attached, electronic hardware components, etc.). Accordingly, the present invention further provides SNP detection kits and systems, including but not limited to, packaged probe and primer sets (e.g., TaqMan probe/primer sets), arrays/microarrays of nucleic acid molecules, and beads that contain one or more probes, primers, or other detection reagents for detecting one or more SNPs of the present invention. The kits/systems can optionally include various electronic hardware components; for example, arrays (“DNA chips”) and microfluidic systems (“lab-on-a-chip” systems) provided by various manufacturers typically comprise hardware components. Other kits/systems (e.g., probe/primer sets) may not include electronic hardware components, but may be comprised of, for example, one or more SNP detection reagents (along with, optionally, other biochemical reagents) packaged in one or more containers.

[0156] In some embodiments, a SNP detection kit typically contains one or more detection reagents and other components (e.g., a buffer, enzymes such as DNA polymerases or ligases, chain extension nucleotides such as deoxynucleotide triphosphates, and in the case of Sanger-type DNA sequencing reactions, chain terminating nucleotides, positive control sequences, negative control sequences, and the like) necessary to carry out an assay or reaction, such as amplification and/or detection of a SNP-containing nucleic acid molecule. A kit may further contain means for determining the amount of a target nucleic acid, and means for comparing the amount with a standard, and can comprise instructions for using the kit to detect the SNP-containing nucleic acid molecule of interest. In one embodiment of the present invention, kits are provided which contain the necessary reagents to carry out one or more assays to detect one or more SNPs disclosed herein. In a preferred embodiment of the present invention, SNP detection kits/systems are in the form of nucleic acid arrays, or compartmentalized kits, including microfluidic/lab-on-a-chip systems.

[0157] SNP detection kits/systems may contain, for example, one or more probes, or pairs of probes, that hybridize to a nucleic acid molecule at or near each target SNP position. Multiple pairs of allele-specific probes may be included in the kit/system to simultaneously assay large numbers of SNPs, at least one of which is a SNP of the present invention. In some kits/systems, the allele-specific probes are immobilized to a substrate such as an array or bead. For example, the same substrate can comprise allele-specific probes for detecting at least 1; 10; 100; 1000; 10,000; 100,000 (or any other number in-between) or substantially all of the SNPs shown in Table 1 and/or Table 2.

[0158] The terms “arrays”, “microarrays”, and “DNA chips” are used herein interchangeably to refer to an array of distinct polynucleotides affixed to a substrate, such as glass, plastic, paper, nylon or other type of membrane, filter, chip, or any other suitable solid support. The polynucleotides can be synthesized directly on the substrate, or synthesized separate from the substrate and then affixed to the substrate. In one embodiment, the microarray is prepared and used according to the methods described in U.S. Pat. No. 5,837,832, Chee et al., PCT application WO95/11995 (Chee et al.), Lockhart, D. J. et al. (1996; Nat. Biotech. 14: 1675-1680) and Schena, M. et al. (1996; Proc. Natl. Acad. Sci. 93: 10614-10619), all of which are incorporated herein in their entirety by reference. In other embodiments, such arrays are produced by the methods described by Brown et al., U.S. Pat. No. 5,807,522.

[0159] Nucleic acid arrays are reviewed in the following references: Zammatteo et al., “New chips for molecular biology and diagnostics”, Biotechnol Annu Rev. 2002;8:85-101; Sosnowski et al., “Active microelectronic array system for DNA hybridization, genotyping and pharmacogenomic applications”, Psychiatr Genet. 2002 December; 12(4):181-92; Heller, “DNA microarray technology: devices, systems, and applications”, Annu Rev Biomed Eng. 2002;4:129-53. Epub 2002 Mar. 22; Kolchinsky et al., “Analysis of SNPs and other genomic variations using gel-based chips”, Hum Mutat. 2002 April; 19(4):343-60; and McGall et al., “High-density genechip oligonucleotide probe arrays”, Adv Biochem Eng Biotechnol. 2002;77:21-42.

[0160] Any number of probes, such as allele-specific probes, may be implemented in an array, and each probe or pair of probes can hybridize to a different SNP position. In the case of polynucleotide probes, they can be synthesized at designated areas (or synthesized separately and then affixed to designated areas) on a substrate using a light-directed chemical process. Each DNA chip can contain, for example, thousands to millions of individual synthetic polynucleotide probes arranged in a grid-like pattern and miniaturized (e.g., to the size of a dime). Preferably, probes are attached to a solid support in an ordered, addressable array.

[0161] A microarray can be composed of a large number of unique, single-stranded polynucleotides, usually either synthetic antisense polynucleotides or fragments of cDNAs, fixed to a solid support. Typical polynucleotides are preferably about 6-60 nucleotides in length, more preferably about 15-30 nucleotides in length, and most preferably about 18-25 nucleotides in length. For certain types of microarrays or other detection kits/systems, it may be preferable to use oligonucleotides that are only about 7-20 nucleotides in length. In other types of arrays, such as arrays used in conjunction with chemiluminescent detection technology, preferred probe lengths can be, for example, about 15-80 nucleotides in length, preferably about 50-70 nucleotides in length, more preferably about 55-65 nucleotides in length, and most preferably about 60 nucleotides in length. The microarray or detection kit can contain polynucleotides that cover the known 5′ or 3′ sequence of a gene/transcript or target SNP site, sequential polynucleotides that cover the full-length sequence of a gene/transcript; or unique polynucleotides selected from particular areas along the length of a target gene/transcript sequence, particularly areas corresponding to one or more SNPs disclosed in Table 1 and/or Table 2. Polynucleotides used in the microarray or detection kit can be specific to a SNP or SNPs of interest (e.g., specific to a particular SNP allele at a target SNP site, or specific to particular SNP alleles at multiple different SNP sites), or specific to a polymorphic gene/transcript or genes/transcripts of interest.

[0162] Hybridization assays based on polynucleotide arrays rely on the differences in hybridization stability of the probes to perfectly matched and mismatched target sequence variants. For SNP genotyping, it is generally preferable that stringency conditions used in hybridization assays are high enough such that nucleic acid molecules that differ from one another at as little as a single SNP position can be differentiated (e.g., typical SNP hybridization assays are designed so that hybridization will occur only if one particular nucleotide is present at a SNP position, but will not occur if an alternative nucleotide is present at that SNP position). Such high stringency conditions may be preferable when using, for example, nucleic acid arrays of allele-specific probes for SNP detection. Such high stringency conditions are described in the preceding section, and are well known to those skilled in the art and can be found in, for example, Current Protocols in Molecular Biology, John Wiley & Sons, N.Y. (1989), 6.3.1-6.3.6.

[0163] In other embodiments, the arrays are used in conjunction with chemiluminescent detection technology. The following patents and patent applications, which are all hereby incorporated by reference, provide additional information pertaining to chemiluminescent detection: U.S. patent application Ser. Nos. 10/620,332 and 10/620,333 describe chemiluminescent approaches for microarray detection; U.S. Pat. Nos. 6,124,478, 6,107,024, 5,994,073, 5,981,768, 5,871,938, 5,843,681, 5,800,999, and 5,773,628 describe methods and compositions of dioxetane for performing chemiluminescent detection; and U.S. published application US2002/0110828 discloses methods and compositions for microarray controls.

[0164] In one embodiment of the invention, a nucleic acid array can comprise an array of probes of about 15-25 nucleotides in length. In further embodiments, a nucleic acid array can comprise any number of probes, in which at least one probe is capable of detecting one or more SNPs disclosed in Table 1 and/or Table 2, and/or at least one probe comprises a fragment of one of the sequences selected from the group consisting of those disclosed in Table 1, Table 2, the Sequence Listing, and sequences complementary thereto, said fragment comprising at least about 8 consecutive nucleotides, preferably 10, 12, 15, 16, 18, 20, more preferably 22, 25, 30, 40, 47, 50, 55, 60, 65, 70, 80, 90, 100, or more consecutive nucleotides (or any other number in-between) and containing (or being complementary to) a novel SNP allele disclosed in Table 1 and/or Table 2. In some embodiments, the nucleotide complementary to the SNP site is within 5, 4, 3, 2, or 1 nucleotide from the center of the probe, more preferably at the center of said probe.

[0165] A polynucleotide probe can be synthesized on the surface of the substrate by using a chemical coupling procedure and an ink jet application apparatus, as described in PCT application WO95/251116 (Baldeschweiler et al.) which is incorporated herein in its entirety by reference. In another aspect, a “gridded” array analogous to a dot (or slot) blot may be used to arrange and link cDNA fragments or oligonucleotides to the surface of a substrate using a vacuum system, thermal, UV, mechanical or chemical bonding procedures. An array, such as those described above, may be produced by hand or by using available devices (slot blot or dot blot apparatus), materials (any suitable solid support), and machines (including robotic instruments), and may contain 8, 24, 96, 384, 1536, 6144 or more polynucleotides, or any other number which lends itself to the efficient use of commercially available instrumentation.

[0166] Using such arrays or other kits/systems, the present invention provides methods of identifying the SNPs disclosed herein in a test sample. Such methods typically involve incubating a test sample of nucleic acids with an array comprising one or more probes corresponding to at least one SNP position of the present invention, and assaying for binding of a nucleic acid from the test sample with one or more of the probes. Conditions for incubating a SNP detection reagent (or a kit/system that employs one or more such SNP detection reagents) with a test sample vary. Incubation conditions depend on such factors as the format employed in the assay, the detection methods employed, and the type and nature of the detection reagents used in the assay. One skilled in the art will recognize that any one of the commonly available hybridization, amplification and array assay formats can readily be adapted to detect the SNPs disclosed herein.

[0167] A SNP detection kit/system of the present invention may include components that are used to prepare nucleic acids from a test sample for the subsequent amplification and/or detection of a SNP-containing nucleic acid molecule. Such sample preparation components can be used to produce nucleic acid extracts (including DNA and/or RNA), proteins or membrane extracts from any bodily fluids (such as blood, serum, plasma, urine, saliva, phlegm, gastric juices, semen, tears, sweat, etc.), skin, hair, cells (especially nucleated cells), biopsies, buccal swabs or tissue specimens. The test samples used in the above-described methods will vary based on such factors as the assay format, nature of the detection method, and the specific tissues, cells or extracts used as the test sample to be assayed. Methods of preparing nucleic acids, proteins, and cell extracts are well known in the art and can be readily adapted to obtain a sample that is compatible with the system utilized. Automated sample preparation systems for extracting nucleic acids from a test sample are commercially available, and examples are Qiagen's BioRobot 9600, Applied Biosystems' PRISM 6700, and Roche Molecular Systems' COBAS AmpliPrep System.

[0168] Another form of kit contemplated by the present invention is a compartmentalized kit. A compartmentalized kit includes any kit in which reagents are contained in separate containers. Such containers include, for example, small glass containers, plastic containers, strips of plastic, glass or paper, or arraying material such as silica. Such containers allow one to efficiently transfer reagents from one compartment to another compartment such that the test samples and reagents are not cross-contaminated, or from one container to another vessel not included in the kit, and the agents or solutions of each container can be added in a quantitative fashion from one compartment to another or to another vessel. Such containers may include, for example, one or more containers which will accept the test sample, one or more containers which contain at least one probe or other SNP detection reagent for detecting one or more SNPs of the present invention, one or more containers which contain wash reagents (such as phosphate buffered saline, Tris-buffers, etc.), and one or more containers which contain the reagents used to reveal the presence of the bound probe or other SNP detection reagents. The kit can optionally further comprise compartments and/or reagents for, for example, nucleic acid amplification or other enzymatic reactions such as primer extension reactions, hybridization, ligation, electrophoresis (preferably capillary electrophoresis), mass spectrometry, and/or laser-induced fluorescent detection. The kit may also include instructions for using the kit. Exemplary compartmentalized kits include microfluidic devices known in the art (see, e.g., Weigl et al., “Lab-on-a-chip for drug development”, Adv Drug Deliv Rev. 2003 Feb. 24;55(3):349-77). In such microfluidic devices, the containers may be referred to as, for example, microfluidic “compartments”, “chambers”, or “channels”.

[0169] Microfluidic devices, which may also be referred to as “lab-on-a-chip” systems, biomedical micro-electro-mechanical systems (bioMEMs), or multicomponent integrated systems, are exemplary kits/systems of the present invention for analyzing SNPs. Such systems miniaturize and compartmentalize processes such as probe/target hybridization, nucleic acid amplification, and capillary electrophoresis reactions in a single functional device. Such microfluidic devices typically utilize detection reagents in at least one aspect of the system, and such detection reagents may be used to detect one or more SNPs of the present invention. One example of a microfluidic system is disclosed in U.S. Pat. No. 5,589,136, which describes the integration of PCR amplification and capillary electrophoresis in chips. Exemplary microfluidic systems comprise a pattern of microchannels designed onto a glass, silicon, quartz, or plastic wafer included on a microchip. The movements of the samples may be controlled by electric, electroosmotic or hydrostatic forces applied across different areas of the microchip to create functional microscopic valves and pumps with no moving parts. Varying the voltage can be used as a means to control the liquid flow at intersections between the micro-machined channels and to change the liquid flow rate for pumping across different sections of the microchip. See, for example, U.S. Pat. No. 6,153,073, Dubrow et al., and U.S. Pat. No. 6,156,181, Parce et al.

[0170] For genotyping SNPs, an exemplary microfluidic system may integrate, for example, nucleic acid amplification, primer extension, capillary electrophoresis, and a detection method such as laser induced fluorescence detection. In a first step of an exemplary process for using such an exemplary system, nucleic acid samples are amplified, preferably by PCR. Then, the amplification products are subjected to automated primer extension reactions using ddNTPs (specific fluorescence for each ddNTP) and the appropriate oligonucleotide primers to carry out primer extension reactions which hybridize just upstream of the targeted SNP. Once the extension at the 3′ end is completed, the primers are separated from the unincorporated fluorescent ddNTPs by capillary electrophoresis. The separation medium used in capillary electrophoresis can be, for example, polyacrylamide, polyethyleneglycol or dextran. The incorporated ddNTPs in the single nucleotide primer extension products are identified by laser-induced fluorescence detection. Such an exemplary microchip can be used to process, for example, at least 96 to 384 samples, or more, in parallel.

[0171] Uses of Nucleic Acid Molecules

[0172] The nucleic acid molecules of the present invention have a variety of uses, especially in the diagnosis and treatment of stenosis. For example, the nucleic acid molecules are useful as hybridization probes, such as for genotyping SNPs in messenger RNA, transcript, cDNA, genomic DNA, amplified DNA or other nucleic acid molecules, and for isolating full-length cDNA and genomic clones encoding the variant peptides disclosed in Table 1 as well as their orthologs.

[0173] A probe can hybridize to any nucleotide sequence along the entire length of a nucleic acid molecule provided in Table 1 and/or Table 2. Preferably, a probe of the present invention hybridizes to a region of a target sequence that encompasses a SNP position indicated in Table 1 and/or Table 2. More preferably, a probe hybridizes to a SNP-containing target sequence in a sequence-specific manner such that it distinguishes the target sequence from other nucleotide sequences which vary from the target sequence only by which nucleotide is present at the SNP site. Such a probe is particularly useful for detecting the presence of a SNP-containing nucleic acid in a test sample, or for determining which nucleotide (allele) is present at a particular SNP site (i.e., genotyping the SNP site).

[0174] A nucleic acid hybridization probe may be used for determining the presence, level, form, and/or distribution of nucleic acid expression. The nucleic acid whose level is determined can be DNA or RNA. Accordingly, probes specific for the SNPs described herein can be used to assess the presence, expression and/or gene copy number in a given cell, tissue, or organism. These uses are relevant for diagnosis of disorders involving an increase or decrease in gene expression relative to normal levels. In vitro techniques for detection of mRNA include, for example, Northern blot hybridizations and in situ hybridizations. In vitro techniques for detecting DNA include Southern blot hybridizations and in situ hybridizations (Sambrook and Russell, 2000, Molecular Cloning: A Laboratory Manual, Cold Spring Harbor Press, Cold Spring Harbor, N.Y.).

[0175] Probes can be used as part of a diagnostic test kit for identifying cells or tissues in which a variant protein is expressed, such as by measuring the level of a variant protein-encoding nucleic acid (e.g., mRNA) in a sample of cells from a subject or determining if a polynucleotide contains a SNP of interest.

[0176] Thus, the nucleic acid molecules of the invention can be used as hybridization probes to detect the SNPs disclosed herein, thereby determining whether an individual with the polymorphisms is at risk for stenosis or has developed early stage stenosis. Detection of a SNP associated with a disease phenotype provides a diagnostic tool for an active disease and/or genetic predisposition to the disease.

[0177] The nucleic acid molecules of the invention are also useful as primers to amplify any given region of a nucleic acid molecule, particularly a region containing a SNP identified in Table 1 and/or Table 2.

[0178] The nucleic acid molecules of the invention are also useful for constructing recombinant vectors (described in greater detail below). Such vectors include expression vectors that express a portion of, or all of, any of the variant peptide sequences provided in Table 1. Vectors also include insertion vectors, used to integrate into another nucleic acid molecule sequence, such as into the cellular genome, to alter in situ expression of a gene and/or gene product. For example, an endogenous coding sequence can be replaced via homologous recombination with all or part of the coding region containing one or more specifically introduced SNPs.

[0179] The nucleic acid molecules of the invention are also useful for expressing antigenic portions of the variant proteins, particularly antigenic portions that contain a variant amino acid sequence (e.g., an amino acid substitution) caused by a SNP disclosed in Table 1 and/or Table 2.

[0180] The nucleic acid molecules of the invention are also useful for constructing vectors containing a gene regulatory region of the nucleic acid molecules of the present invention.

[0181] The nucleic acid molecules of the invention are also useful for designing ribozymes corresponding to all, or a part, of an mRNA molecule expressed from a SNP-containing nucleic acid molecule described herein.

[0182] The nucleic acid molecules of the invention are also useful for constructing host cells expressing a part, or all, of the nucleic acid molecules and variant peptides.

[0183] The nucleic acid molecules of the invention are also useful for constructing transgenic animals expressing all, or a part, of the nucleic acid molecules and variant peptides. The production of recombinant cells and transgenic animals having nucleic acid molecules which contain the SNPs disclosed in Table 1 and/or Table 2 allow, for example, effective clinical design of treatment compounds and dosage regimens.

[0184] The nucleic acid molecules of the invention are also useful in assays for drug screening to identify compounds that, for example, modulate nucleic acid expression.

[0185] The nucleic acid molecules of the invention are also useful in gene therapy in patients whose cells have aberrant gene expression. Thus, recombinant cells, which include a patient's cells that have been engineered ex vivo and returned to the patient, can be introduced into an individual where the recombinant cells produce the desired protein to treat the individual.

[0186] SNP Genotyping Methods

[0187] The process of determining which specific nucleotide (i.e., allele) is present at each of one or more SNP positions, such as a SNP position in a nucleic acid molecule disclosed in Table 1 and/or Table 2, is referred to as SNP genotyping. The present invention provides methods of SNP genotyping, such as for use in screening for stenosis or related pathologies, or determining predisposition thereto, or determining responsiveness to a form of treatment, or in genome mapping or SNP association analysis, etc.

[0188] Nucleic acid samples can be genotyped to determine which allele(s) is/are present at any given genetic region (e.g., SNP position) of interest by methods well known in the art. The neighboring sequence can be used to design SNP detection reagents such as oligonucleotide probes, which may optionally be implemented in a kit format. Exemplary SNP genotyping methods are described in Chen et al., “Single nucleotide polymorphism genotyping: biochemistry, protocol, cost and throughput”, Pharmacogenomics J. 2003;3(2):77-96; Kwok et al., “Detection of single nucleotide polymorphisms”, Curr Issues Mol. Biol. 2003 April; 5(2):43-60; Shi, “Technologies for individual genotyping: detection of genetic polymorphisms in drug targets and disease genes”, Am J Pharmacogenomics. 2002;2(3):197-205; and Kwok, “Methods for genotyping single nucleotide polymorphisms”, Annu Rev Genomics Hum Genet 2001;2:235-58. Exemplary techniques for high-throughput SNP genotyping are described in Marnellos, “High-throughput SNP analysis for genetic association studies”, Curr Opin Drug Discov Devel. 2003 May; 6(3):317-21. Common SNP genotyping methods include, but are not limited to, TaqMan assays, molecular beacon assays, nucleic acid arrays, allele-specific primer extension, allele-specific PCR, arrayed primer extension, homogeneous primer extension assays, primer extension with detection by mass spectrometry, pyrosequencing, multiplex primer extension sorted on genetic arrays, ligation with rolling circle amplification, homogeneous ligation, OLA (U.S. Pat. No. 4,988,167), multiplex ligation reaction sorted on genetic arrays, restriction-fragment length polymorphism, single base extension-tag assays, and the Invader assay. Such methods may be used in combination with detection mechanisms such as, for example, luminescence or chemiluminescence detection, fluorescence detection, time-resolved fluorescence detection, fluorescence resonance energy transfer, fluorescence polarization, mass spectrometry, and electrical detection.

[0189] Various methods for detecting polymorphisms include, but are not limited to, methods in which protection from cleavage agents is used to detect mismatched bases in RNA/RNA or RNA/DNA duplexes (Myers et al., Science 230:1242 (1985); Cotton et al., PNAS 85:4397 (1988); and Saleeba et al., Meth. Enzymol. 217:286-295 (1992)), comparison of the electrophoretic mobility of variant and wild type nucleic acid molecules (Orita et al., PNAS 86:2766 (1989); Cotton et al., Mutat. Res. 285:125-144 (1993); and Hayashi et al., Genet. Anal. Tech. Appl. 9:73-79 (1992)), and assaying the movement of polymorphic or wild-type fragments in polyacrylamide gels containing a gradient of denaturant using denaturing gradient gel electrophoresis (DGGE) (Myers et al., Nature 313:495 (1985)). Sequence variations at specific locations can also be assessed by nuclease protection assays such as RNase and SI protection or chemical cleavage methods.

[0190] In a preferred embodiment, SNP genotyping is performed using the TaqMan assay, which is also known as the 5′ nuclease assay (U.S. Pat. Nos. 5,210,015 and 5,538,848). The TaqMan assay detects the accumulation of a specific amplified product during PCR. The TaqMan assay utilizes an oligonucleotide probe labeled with a fluorescent reporter dye and a quencher dye. The reporter dye is excited by irradiation at an appropriate wavelength, it transfers energy to the quencher dye in the same probe via a process called fluorescence resonance energy transfer (FRET). When attached to the probe, the excited reporter dye does not emit a signal. The proximity of the quencher dye to the reporter dye in the intact probe maintains a reduced fluorescence for the reporter. The reporter dye and quencher dye may be at the 5′ most and the 3′ most ends, respectively, or vice versa. Alternatively, the reporter dye may be at the 5′ or 3′ most end while the quencher dye is attached to an internal nucleotide, or vice versa. In yet another embodiment, both the reporter and the quencher may be attached to internal nucleotides at a distance from each other such that fluorescence of the reporter is reduced.

[0191] During PCR, the 5′ nuclease activity of DNA polymerase cleaves the probe, thereby separating the reporter dye and the quencher dye and resulting in increased fluorescence of the reporter. Accumulation of PCR product is detected directly by monitoring the increase in fluorescence of the reporter dye. The DNA polymerase cleaves the probe between the reporter dye and the quencher dye only if the probe hybridizes to the target SNP-containing template which is amplified during PCR, and the probe is designed to hybridize to the target SNP site only if a particular SNP allele is present.

[0192] Preferred TaqMan primer and probe sequences can readily be determined using the SNP and associated nucleic acid sequence information provided herein. A number of computer programs, such as Primer Express (Applied Biosystems, Foster City, Calif.), can be used to rapidly obtain optimal primer/probe sets. It will be apparent to one of skill in the art that such primers and probes for detecting the SNPs of the present invention are useful in diagnostic assays for stenosis and related pathologies, and can be readily incorporated into a kit format. The present invention also includes modifications of the Taqman assay well known in the art such as the use of Molecular Beacon probes (U.S. Pat. Nos. 5,118,801 and 5,312,728) and other variant formats (U.S. Pat. Nos. 5,866,336 and 6,117,635).

[0193] Another preferred method for genotyping the SNPs of the present invention is the use of two oligonucleotide probes in an OLA (see, e.g., U.S. Pat. No. 4,988,617). In this method, one probe hybridizes to a segment of a target nucleic acid with its 3′ most end aligned with the SNP site. A second probe hybridizes to an adjacent segment of the target nucleic acid molecule directly 3′ to the first probe. The two juxtaposed probes hybridize to the target nucleic acid molecule, and are ligated in the presence of a linking agent such as a ligase if there is perfect complementarity between the 3′ most nucleotide of the first probe with the SNP site. If there is a mismatch, ligation would not occur. After the reaction, the ligated probes are separated from the target nucleic acid molecule, and detected as indicators of the presence of a SNP.

[0194] The following patents, patent applications, and published international patent applications, which are all hereby incorporated by reference, provide additional information pertaining to techniques for carrying out various types of OLA: U.S. Pat. Nos. 6,027,889, 6,268,148, 5494810, 5830711, and 6054564 describe OLA strategies for performing SNP detection; WO 97/31256 and WO 00/56927 describe OLA strategies for performing SNP detection using universal arrays, wherein a zipcode sequence can be introduced into one of the hybridization probes, and the resulting product, or amplified product, hybridized to a universal zip code array; U.S. application US01/17329 (and Ser. No. 09/584,905) describes OLA (or LDR) followed by PCR, wherein zipcodes are incorporated into OLA probes, and amplified PCR products are determined by electrophoretic or universal zipcode array readout; U.S. application 60/427,818, 60/445,636, and 60/445,494 describe SNPlex methods and software for multiplexed SNP detection using OLA followed by PCR, wherein zipcodes are incorporated into OLA probes, and amplified PCR products are hybridized with a zipchute reagent, and the identity of the SNP determined from electrophoretic readout of the zipchute. In some embodiments, OLA is carried out prior to PCR (or another method of nucleic acid amplification). In other embodiments, PCR (or another method of nucleic acid amplification) is carried out prior to OLA.

[0195] Another method for SNP genotyping is based on mass spectrometry. Mass spectrometry takes advantage of the unique mass of each of the four nucleotides of DNA. SNPs can be unambiguously genotyped by mass spectrometry by measuring the differences in the mass of nucleic acids having alternative SNP alleles. MALDI-TOF (Matrix Assisted Laser Desorption Ionization—Time of Flight) mass spectrometry technology is preferred for extremely precise determinations of molecular mass, such as SNPs. Numerous approaches to SNP analysis have been developed based on mass spectrometry. Preferred mass spectrometry-based methods of SNP genotyping include primer extension assays, which can also be utilized in combination with other approaches, such as traditional gel-based formats and microarrays.

[0196] Typically, the primer extension assay involves designing and annealing a primer to a template PCR amplicon upstream (5′) from a target SNP position. A mix of dideoxynucleotide triphosphates (ddNTPs) and/or deoxynucleotide triphosphates (dNTPs) are added to a reaction mixture containing template (e.g., a SNP-containing nucleic acid molecule which has typically been amplified, such as by PCR), primer, and DNA polymerase. Extension of the primer terminates at the first position in the template where a nucleotide complementary to one of the ddNTPs in the mix occurs. The primer can be either immediately adjacent (i.e., the nucleotide at the 3′ end of the primer hybridizes to the nucleotide next to the target SNP site) or two or more nucleotides removed from the SNP position. If the primer is several nucleotides removed from the target SNP position, the only limitation is that the template sequence between the 3′ end of the primer and the SNP position cannot contain a nucleotide of the same type as the one to be detected, or this will cause premature termination of the extension primer. Alternatively, if all four ddNTPs alone, with no dNTPs, are added to the reaction mixture, the primer will always be extended by only one nucleotide, corresponding to the target SNP position. In this instance, primers are designed to bind one nucleotide upstream from the SNP position (i.e., the nucleotide at the 3′ end of the primer hybridizes to the nucleotide that is immediately adjacent to the target SNP site on the 5′ side of the target SNP site). Extension by only one nucleotide is preferable, as it minimizes the overall mass of the extended primer, thereby increasing the resolution of mass differences between alternative SNP nucleotides. Furthermore, mass-tagged ddNTPs can be employed in the primer extension reactions in place of unmodified ddNTPs. This increases the mass difference between primers extended with these ddNTPs, thereby providing increased sensitivity and accuracy, and is particularly useful for typing heterozygous base positions. Mass-tagging also alleviates the need for intensive sample-preparation procedures and decreases the necessary resolving power of the mass spectrometer.

[0197] The extended primers can then be purified and analyzed by MALDI-TOF mass spectrometry to determine the identity of the nucleotide present at the target SNP position. In one method of analysis, the products from the primer extension reaction are combined with light absorbing crystals that form a matrix. The matrix is then hit with an energy source such as a laser to ionize and desorb the nucleic acid molecules into the gas-phase. The ionized molecules are then ejected into a flight tube and accelerated down the tube towards a detector. The time between the ionization event, such as a laser pulse, and collision of the molecule with the detector is the time of flight of that molecule. The time of flight is precisely correlated with the mass-to-charge ratio (m/z) of the ionized molecule. Ions with smaller m/z travel down the tube faster than ions with larger m/z and therefore the lighter ions reach the detector before the heavier ions. The time-of-flight is then converted into a corresponding, and highly precise, m/z. In this manner, SNPs can be identified based on the slight differences in mass, and the corresponding time of flight differences, inherent in nucleic acid molecules having different nucleotides at a single base position. For further information regarding the use of primer extension assays in conjunction with MALDI-TOF mass spectrometry for SNP genotyping, see, e.g., Wise et al., “A standard protocol for single nucleotide primer extension in the human genome using matrix-assisted laser desorption/ionization time-of-flight mass spectrometry”, Rapid Commun Mass Spectrom. 2003; 17(11):1195-202.

[0198] The following references provide further information describing mass spectrometry-based methods for SNP genotyping: Bocker, “SNP and mutation discovery using base-specific cleavage and MALDI-TOF mass spectrometry”, Bioinformatics. 2003 July; 19 Suppl 1:144-153; Storm et al., “MALDI-TOF mass spectrometry-based SNP genotyping”, Methods Mol. Biol. 2003;212:241-62; Jurinke et al., “The use of MassARRAY technology for high throughput genotyping”, Adv Biochem Eng Biotechnol. 2002;77:57-74; and Jurinke et al., “Automated genotyping using the DNA MassArray technology”, Methods Mol. Biol. 2002;187:179-92.

[0199] SNPs can also be scored by direct DNA sequencing. A variety of automated sequencing procedures can be utilized ((1995) Biotechniques 19:448), including sequencing by mass spectrometry (see, e.g., PCT International Publication No. WO94/16101; Cohen et al., Adv. Chromatogr. 36:127-162 (1996); and Griffin et al., Appl. Biochem. Biotechnol. 38:147-159 (1993)). The nucleic acid sequences of the present invention enable one of ordinary skill in the art to readily design sequencing primers for such automated sequencing procedures. Commercial instrumentation, such as the Applied Biosystems 377, 3100, 3700, 3730, and 3730×1 DNA Analyzers (Foster City, Calif.), is commonly used in the art for automated sequencing.

[0200] Other methods that can be used to genotype the SNPs of the present invention include single-strand conformational polymorphism (SSCP), and denaturing gradient gel electrophoresis (DGGE) (Myers et al., Nature 313:495 (1985)). SSCP identifies base differences by alteration in electrophoretic migration of single stranded PCR products, as described in Orita et al., Proc. Nat. Acad. Single-stranded PCR products can be generated by heating or otherwise denaturing double stranded PCR products. Single-stranded nucleic acids may refold or form secondary structures that are partially dependent on the base sequence. The different electrophoretic mobilities of single-stranded amplification products are related to base-sequence differences at SNP positions. DGGE differentiates SNP alleles based on the different sequence-dependent stabilities and melting properties inherent in polymorphic DNA and the corresponding differences in electrophoretic migration patterns in a denaturing gradient gel (Erlich, ed., PCR Technology, Principles and Applications for DNA Amplification, W.H. Freeman and Co, New York, 1992, Chapter 7).

[0201] Sequence-specific ribozymes (U.S. Pat. No. 5,498,531) can also be used to score SNPs based on the development or loss of a ribozyme cleavage site. Perfectly matched sequences can be distinguished from mismatched sequences by nuclease cleavage digestion assays or by differences in melting temperature. If the SNP affects a restriction enzyme cleavage site, the SNP can be identified by alterations in restriction enzyme digestion patterns, and the corresponding changes in nucleic acid fragment lengths determined by gel electrophoresis

[0202] SNP genotyping can include the steps of, for example, collecting a biological sample from a human subject (e.g., sample of tissues, cells, fluids, secretions, etc.), isolating nucleic acids (e.g., genomic DNA, mRNA or both) from the cells of the sample, contacting the nucleic acids with one or more primers which specifically hybridize to a region of the isolated nucleic acid containing a target SNP under conditions such that hybridization and amplification of the target nucleic acid region occurs, and determining the nucleotide present at the SNP position of interest, or, in some assays, detecting the presence or absence of an amplification product (assays can be designed so that hybridization and/or amplification will only occur if a particular SNP allele is present or absent). In some assays, the size of the amplification product is detected and compared to the length of a control sample; for example, deletions and insertions can be detected by a change in size of the amplified product compared to a normal genotype.

[0203] SNP genotyping is useful for numerous practical applications, as described below. Examples of such applications include, but are not limited to, SNP-disease association analysis, disease predisposition screening, disease diagnosis, disease prognosis, disease progression monitoring, determining therapeutic strategies based on an individual's genotype (“pharmacogenomics”), developing therapeutic agents based on SNP genotypes associated with a disease or likelihood of responding to a drug, stratifying a patient population for clinical trial for a treatment regimen, predicting the likelihood that an individual will experience toxic side effects from a therapeutic agent, and human identification applications such as forensics.

[0204] Analysis of Genetic Association Between SNPs and Phenotypic Traits

[0205] SNP genotyping for disease diagnosis, disease predisposition screening, disease prognosis, determining drug responsiveness (pharmacogenomics), drug toxicity screening, and other uses described herein, typically relies on initially establishing a genetic association between one or more specific SNPs and the particular phenotypic traits of interest.

[0206] Different study designs may be used for genetic association studies (Modern Epidemiology, Lippincott Williams & Wilkins (1998), 609-622). Observational studies are most frequently carried out in which the response of the patients is not interfered with. The first type of observational study identifies a sample of persons in whom the suspected cause of the disease is present and another sample of persons in whom the suspected cause is absent, and then the frequency of development of disease in the two samples is compared. These sampled populations are called cohorts, and the study is a prospective study. The other type of observational study is case-control or a retrospective study. In typical case-control studies, samples are collected from individuals with the phenotype of interest (cases) such as certain manifestations of a disease, and from individuals without the phenotype (controls) in a population (target population) that conclusions are to be drawn from. Then the possible causes of the disease are investigated retrospectively. As the time and costs of collecting samples in case-control studies are considerably less than those for prospective studies, case-control studies are the more commonly used study design in genetic association studies, at least during the exploration and discovery stage.

[0207] In both types of observational studies, there may be potential confounding factors that should be taken into consideration. Confounding factors are those that are associated with both the real cause(s) of the disease and the disease itself, and they include demographic information such as age, gender, ethnicity as well as environmental factors. When confounding factors are not matched in cases and controls in a study, and are not controlled properly, spurious association results can arise. If potential confounding factors are identified, they should be controlled for by analysis methods explained below.

[0208] In a genetic association study, the cause of interest to be tested is a certain allele or a SNP or a combination of alleles or a haplotype from several SNPs. Thus, tissue specimens (e.g., whole blood) from the sampled individuals may be collected and genomic DNA genotyped for the SNP(s) of interest. In addition to the phenotypic trait of interest, other information such as demographic (e.g., age, gender, ethnicity, etc.), clinical, and environmental information that may influence the outcome of the trait can be collected to further characterize and define the sample set. In many cases, these factors are known to be associated with diseases and/or SNP allele frequencies. There are likely gene-environment and/or gene-gene interactions as well. Analysis methods to address gene-environment and gene-gene interactions (for example, the effects of the presence of both susceptibility alleles at two different genes can be greater than the effects of the individual alleles at two genes combined) are discussed below.

[0209] After all the relevant phenotypic and genotypic information has been obtained, statistical analyses are carried out to determine if there is any significant correlation between the presence of an allele or a genotype with the phenotypic characteristics of an individual. Preferably, data inspection and cleaning are first performed before carrying out statistical tests for genetic association. Epidemiological and clinical data of the samples can be summarized by descriptive statistics with tables and graphs. Data validation is preferably performed to check for data completion, inconsistent entries, and outliers. Chi-squared tests and t-tests (Wilcoxon rank-sum tests if distributions are not normal) may then be used to check for significant differences between cases and controls for discrete and continuous variables, respectively. To ensure genotyping quality, Hardy-Weinberg disequilibrium tests can be performed on cases and controls separately. Significant deviation from Hardy-Weinberg equilibrium (HWE) in both cases and controls for individual markers can be indicative of genotyping errors. If HWE is violated in a majority of markers, it is indicative of population substructure that should be further investigated. Moreover, Hardy-Weinberg disequilibrium in cases only can indicate genetic association of the markers with the disease (Genetic Data Analysis, Weir B., Sinauer (1990)).

[0210] To test whether an allele of a single SNP is associated with the case or control status of a phenotypic trait, one skilled in the art can compare allele frequencies in cases and controls. Standard chi-squared tests and Fisher exact tests can be carried out on a 2×2 table (2 SNP alleles×2 outcomes in the categorical trait of interest). To test whether genotypes of a SNP are associated, chi-squared tests can be carried out on a 3×2 table (3 genotypes×2 outcomes). Score tests are also carried out for genotypic association to contrast the three genotypic frequencies (major homozygotes, heterozygotes and minor homozygotes) in cases and controls, and to look for trends using 3 different modes of inheritance, namely dominant (with contrast coefficients 2, −1, −1), additive (with contrast coefficients 1, 0, −1) and recessive (with contrast coefficients 1, 1, −2). Odds ratios for minor versus major alleles, and odds ratios for heterozygote and homozygote variants versus the wild type genotypes are calculated with the desired confidence limits, usually 95%.

[0211] In order to control for confounders and to test for interaction and effect modifiers, stratified analyses may be performed using stratified factors that are likely to be confounding, including demographic information such as age, ethnicity, and gender, or an interacting element or effect modifier, such as a known major gene (e.g., APOE for Alzheimer's disease or HLA genes for autoimmune diseases), or environmental factors such as smoking in lung cancer. Stratified association tests may be carried out using Cochran-Mantel-Haenszel tests that take into account the ordinal nature of genotypes with 0, 1, and 2 variant alleles. Exact tests by StatXact may also be performed when computationally possible. Another way to adjust for confounding effects and test for interactions is to perform stepwise multiple logistic regression analysis using statistical packages such as SAS or R. Logistic regression is a model-building technique in which the best fitting and most parsimonious model is built to describe the relation between the dichotomous outcome (for instance, getting a certain disease or not) and a set of independent variables (for instance, genotypes of different associated genes, and the associated demographic and environmental factors). The most common model is one in which the logit transformation of the odds ratios is expressed as a linear combination of the variables (main effects) and their cross-product terms (interactions) (Applied Logistic Regression, Hosmer and Lemeshow, Wiley (2000)). To test whether a certain variable or interaction is significantly associated with the outcome, coefficients in the model are first estimated and then tested for statistical significance of their departure from zero.

[0212] In addition to performing association tests one marker at a time, haplotype association analysis may also be performed to study a number of markers that are closely linked together. Haplotype association tests can have better power than genotypic or allelic association tests when the tested markers are not the disease-causing mutations themselves but are in linkage disequilibrium with such mutations. The test will even be more powerful if the disease is indeed caused by a combination of alleles on a haplotype (e.g., APOE is a haplotype formed by 2 SNPs that are very close to each other). In order to perform haplotype association effectively, marker-marker linkage disequilibrium measures, both D′ and R², are typically calculated for the markers within a gene to elucidate the haplotype structure. Recent studies (Daly et al, Nature Genetics, 29, 232-235, 2001) in linkage disequilibrium indicate that SNPs within a gene are organized in block pattern, and a high degree of linkage disequilibrium exists within blocks and very little linkage disequilibrium exists between blocks. Haplotype association with the disease status can be performed using such blocks once they have been elucidated.

[0213] Haplotype association tests can be carried out in a similar fashion as the allelic and genotypic association tests. Each haplotype in a gene is analogous to an allele in a multi-allelic marker. One skilled in the art can either compare the haplotype frequencies in cases and controls or test genetic association with different pairs of haplotypes. It has been proposed (Schaid et al, Am. J. Hum. Genet., 70, 425-434, 2002) that score tests can be done on haplotypes using the program “haplo.score”. In that method, haplotypes are first inferred by EM algorithm and score tests are carried out with a generalized linear model (GLM) framework that allows the adjustment of other factors.

[0214] An important decision in the performance of genetic association tests is the determination of the significance level at which significant association can be declared when the p-value of the tests reaches that level. In an exploratory analysis where positive hits will be followed up in subsequent confirmatory testing, an unadjusted p-value <0.1 (a significance level on the lenient side) may be used for generating hypotheses for significant association of a SNP with certain phenotypic characteristics of a disease. It is preferred that a p-value <0.05 (a significance level traditionally used in the art) is achieved in order for a SNP to be considered to have an association with a disease. It is more preferred that a p-value <0.01 (a significance level on the stringent side) is achieved for an association to be declared. When hits are followed up in confirmatory analyses in more samples of the same source or in different samples from different sources, adjustment for multiple testing will be performed as to avoid excess number of hits while maintaining the experiment-wise error rates at 0.05. While there are different methods to adjust for multiple testing to control for different kinds of error rates, a commonly used but rather conservative method is Bonferroni correction to control the experiment-wise or family-wise error rate (Multiple comparisons and multiple tests, Westfall et al, SAS Institute (1999)). Permutation tests to control for the false discovery rates, FDR, can be more powerful (Benjamini and Hochberg, Journal of the Royal Statistical Society, Series B 57, 1289-1300, 1995, Resampling-based Multiple Testing, Westfall and Young, Wiley (1993)). Such methods to control for multiplicity would be preferred when the tests are dependent and controlling for false discovery rates is sufficient as opposed to controlling for the experiment-wise error rates.

[0215] In replication studies using samples from different populations after statistically significant markers have been identified in the exploratory stage, meta-analyses can then be performed by combining evidence of different studies (Modern Epidemiology, Lippincott Williams & Wilkins, 1998, 643-673). If available, association results known in the art for the same SNPs can be included in the meta-analyses.

[0216] Since both genotyping and disease status classification can involve errors, sensitivity analyses may be performed to see how odds ratios and p-values would change upon various estimates on genotyping and disease classification error rates.

[0217] It has been well known that subpopulation-based sampling bias between cases and controls can lead to spurious results in case-control association studies (Ewens and Spielman, Am. J. Hum. Genet. 62, 450-458, 1995) when prevalence of the disease is associated with different subpopulation groups. Such bias can also lead to a loss of statistical power in genetic association studies. To detect population stratification, Pritchard and Rosenberg (Pritchard et al. Am. J. Hum. Gen. 1999, 65:220-228) suggested typing markers that are unlinked to the disease and using results of association tests on those markers to determine whether there is any population stratification. When stratification is detected, the genomic control (GC) method as proposed by Devlin and Roeder (Devlin et al. Biometrics 1999, 55:997-1004) can be used to adjust for the inflation of test statistics due to population stratification. GC method is robust to changes in population structure levels as well as being applicable to DNA pooling designs (Devlin et al. Genet. Epidem. 20001, 21:273-284).

[0218] While Pritchard's method recommended using 15-20 unlinked microsatellite markers, it suggested using more than 30 biallelic markers to get enough power to detect population stratification. For the GC method, it has been shown (Bacanu et al. Am. J. Hum. Genet. 2000, 66:1933-1944) that about 60-70 biallelic markers are sufficient to estimate the inflation factor for the test statistics due to population stratification. Hence, 70 intergenic SNPs can be chosen in unlinked regions as indicated in a genome scan (Kehoe et al. Hum. Mol. Genet. 1999, 8:237-245).

[0219] Once individual risk factors, genetic or non-genetic, have been found for the predisposition to disease, the next step is to set up a classification/prediction scheme to predict the category (for instance, disease or no-disease) that an individual will be in depending on his genotypes of associated SNPs and other non-genetic risk factors. Logistic regression for discrete trait and linear regression for continuous trait are standard techniques for such tasks (Applied Regression Analysis, Draper and Smith, Wiley (1998)). Moreover, other techniques can also be used for setting up classification. Such techniques include, but are not limited to, MART, CART, neural network, and discriminant analyses that are suitable for use in comparing the performance of different methods (The Elements of Statistical Learning, Hastie, Tibshirani & Friedman, Springer (2002)).

[0220] Disease Diagnosis and Predisposition Screening

[0221] Information on association/correlation between genotypes and disease-related phenotypes can be exploited in several ways. For example, in the case of a highly statistically significant association between one or more SNPs with predisposition to a disease for which treatment is available, detection of such a genotype pattern in an individual may justify immediate administration of treatment, or at least the institution of regular monitoring of the individual. Detection of the susceptibility alleles associated with serious disease in a couple contemplating having children may also be valuable to the couple in their reproductive decisions. In the case of a weaker but still statistically significant association between a SNP and a human disease, immediate therapeutic intervention or monitoring may not be justified after detecting the susceptibility allele or SNP. Nevertheless, the subject can be motivated to begin simple life-style changes (e.g., diet, exercise) that can be accomplished at little or no cost to the individual but would confer potential benefits in reducing the risk of developing conditions for which that individual may have an increased risk by virtue of having the susceptibility allele(s).

[0222] The SNPs of the invention may contribute to stenosis in an individual in different ways. Some polymorphisms occur within a protein coding sequence and contribute to disease phenotype by affecting protein structure. Other polymorphisms occur in noncoding regions but may exert phenotypic effects indirectly via influence on, for example, replication, transcription, and/or translation. A single SNP may affect more than one phenotypic trait. Likewise, a single phenotypic trait may be affected by multiple SNPs in different genes.

[0223] As used herein, the terms “diagnose”, “diagnosis”, and “diagnostics” include, but are not limited to any of the following: detection of stenosis that an individual may presently have, predisposition screening (i.e., determining the increased risk of an individual in developing stenosis in the future, or determining whether an individual has a decreased risk of developing stenosis in the future), determining a particular type or subclass of stenosis in an individual known to have stenosis, confirming or reinforcing a previously made diagnosis of stenosis, pharmacogenomic evaluation of an individual to determine which therapeutic strategy that individual is most likely to positively respond to or to predict whether a patient is likely to respond to a particular treatment, predicting whether a patient is likely to experience toxic effects from a particular treatment or therapeutic compound, and evaluating the future prognosis of an individual having stenosis. Such diagnostic uses are based on the SNPs individually or in a unique combination or SNP haplotypes of the present invention.

[0224] Haplotypes are particularly useful in that, for example, fewer SNPs can be genotyped to determine if a particular genomic region harbors a locus that influences a particular phenotype, such as in linkage disequilibrium-based SNP association analysis.

[0225] Linkage disequilibrium (LD) refers to the co-inheritance of alleles (e.g., alternative nucleotides) at two or more different SNP sites at frequencies greater than would be expected from the separate frequencies of occurrence of each allele in a given population. The expected frequency of co-occurrence of two alleles that are inherited independently is the frequency of the first allele multiplied by the frequency of the second allele. Alleles that co-occur at expected frequencies are said to be in “linkage equilibrium”. In contrast, LD refers to any non-random genetic association between allele(s) at two or more different SNP sites, which is generally due to the physical proximity of the two loci along a chromosome. LD can occur when two or more SNPs sites are in close physical proximity to each other on a given chromosome and therefore alleles at these SNP sites will tend to remain unseparated for multiple generations with the consequence that a particular nucleotide (allele) at one SNP site will show a non-random association with a particular nucleotide (allele) at a different SNP site located nearby. Hence, genotyping one of the SNP sites will give almost the same information as genotyping the other SNP site that is in LD.

[0226] For diagnostic purposes, if a particular SNP site is found to be useful for diagnosing stenosis, then the skilled artisan would recognize that other SNP sites which are in LD with this SNP site would also be useful for diagnosing the condition. Various degrees of LD can be encountered between two or more SNPs with the result being that some SNPs are more closely associated (i.e., in stronger LD) than others. Furthermore, the physical distance over which LD extends along a chromosome differs between different regions of the genome, and therefore the degree of physical separation between two or more SNP sites necessary for LD to occur can differ between different regions of the genome.

[0227] For diagnostic applications, polymorphisms (e.g., SNPs and/or haplotypes) that are not the actual disease-causing (causative) polymorphisms, but are in LD with such causative polymorphisms, are also useful. In such instances, the genotype of the polymorphism(s) that is/are in LD with the causative polymorphism is predictive of the genotype of the causative polymorphism and, consequently, predictive of the phenotype (e.g., stenosis) that is influenced by the causative SNP(s). Thus, polymorphic markers that are in LD with causative polymorphisms are useful as diagnostic markers, and are particularly useful when the actual causative polymorphism(s) is/are unknown.

[0228] Linkage disequilibrium in the human genome is reviewed in: Wall et al., “Haplotype blocks and linkage disequilibrium in the human genome”, Nat Rev Genet. 2003 August; 4(8):587-97; Gamer et al., “On selecting markers for association studies: patterns of linkage disequilibrium between two and three diallelic loci”, Genet Epidemiol. 2003 January; 24(1):57-67; Ardlie et al., “Patterns of linkage disequilibrium in the human genome”, Nat Rev Genet. 2002 April; 3(4):299-309 (erratum in Nat Rev Genet 2002 July; 3(7):566); and Remm et al., “High-density genotyping and linkage disequilibrium in the human genome using chromosome 22 as a model”; Curr Opin Chem Biol. 2002 February; 6(1):24-30.

[0229] The contribution or association of particular SNPs and/or SNP haplotypes with disease phenotypes, such as stenosis, enables the SNPs of the present invention to be used to develop superior diagnostic tests capable of identifying individuals who express a detectable trait, such as stenosis, as the result of a specific genotype, or individuals whose genotype places them at an increased or decreased risk of developing a detectable trait at a subsequent time as compared to individuals who do not have that genotype. As described herein, diagnostics may be based on a single SNP or a group of SNPs. Combined detection of a plurality of SNPs (for example, 2, 3, 4, 5, 6, 7, 8, 9, 10, 11, 12, 13, 14, 15, 16, 17, 18, 19, 20, 24, 25, 30, 32, 48, 50, 64, 96, 100, or any other number in-between, or more, of the SNPs provided in Table 1 and/or Table 2) typically increases the probability of an accurate diagnosis. For example, the presence of a single SNP known to correlate with stenosis might indicate a probability of 20% that an individual has or is at risk of developing stenosis, whereas detection of five SNPs, each of which correlates with stenosis, might indicate a probability of 80% that an individual has or is at risk of developing stenosis. To further increase the accuracy of diagnosis or predisposition screening, analysis of the SNPs of the present invention can be combined with that of other polymorphisms or other risk factors of stenosis, such as disease symptoms, pathological characteristics, family history, diet, environmental factors or lifestyle factors.

[0230] It will, of course, be understood by practitioners skilled in the treatment or diagnosis of stenosis that the present invention generally does not intend to provide an absolute identification of individuals who are at risk (or less at risk) of developing stenosis, and/or pathologies related to stenosis, but rather to indicate a certain increased (or decreased) degree or likelihood of developing the disease based on statistically significant association results. However, this information is extremely valuable as it can be used to, for example, initiate preventive treatments or to allow an individual carrying one or more significant SNPs or SNP haplotypes to foresee warning signs such as minor clinical symptoms, or to have regularly scheduled physical exams to monitor for appearance of a condition in order to identify and begin treatment of the condition at an early stage. Particularly with diseases that are extremely debilitating or fatal if not treated on time, the knowledge of a potential predisposition, even if this predisposition is not absolute, would likely contribute in a very significant manner to treatment efficacy.

[0231] The diagnostic techniques of the present invention may employ a variety of methodologies to determine whether a test subject has a SNP or a SNP pattern associated with an increased or decreased risk of developing a detectable trait or whether the individual suffers from a detectable trait as a result of a particular polymorphism/mutation, including, for example, methods which enable the analysis of individual chromosomes for haplotyping, family studies, single sperm DNA analysis, or somatic hybrids. The trait analyzed using the diagnostics of the invention may be any detectable trait that is commonly observed in pathologies and disorders related to stenosis.

[0232] Another aspect of the present invention relates to a method of determining whether an individual is at risk (or less at risk) of developing one or more traits or whether an individual expresses one or more traits as a consequence of possessing a particular trait-causing or trait-influencing allele. These methods generally involve obtaining a nucleic acid sample from an individual and assaying the nucleic acid sample to determine which nucleotide(s) is/are present at one or more SNP positions, wherein the assayed nucleotide(s) is/are indicative of an increased or decreased risk of developing the trait or indicative that the individual expresses the trait as a result of possessing a particular trait-causing or trait-influencing allele.

[0233] In another embodiment, the SNP detection reagents of the present invention are used to determine whether an individual has one or more SNP allele(s) affecting the level (e.g., the concentration of mRNA or protein in a sample, etc.) or pattern (e.g., the kinetics of expression, rate of decomposition, stability profile, Km, Vmax, etc.) of gene expression (collectively, the “gene response” of a cell or bodily fluid). Such a determination can be accomplished by screening for mRNA or protein expression (e.g., by using nucleic acid arrays, RT-PCR, TaqMan assays, or mass spectrometry), identifying genes having altered expression in an individual, genotyping SNPs disclosed in Table 1 and/or Table 2 that could affect the expression of the genes having altered expression (e.g., SNPs that are in and/or around the gene(s) having altered expression, SNPs in regulatory/control regions, SNPs in and/or around other genes that are involved in pathways that could affect the expression of the gene(s) having altered expression, or all SNPs could be genotyped), and correlating SNP genotypes with altered gene expression. In this manner, specific SNP alleles at particular SNP sites can be identified that affect gene expression.

[0234] Pharmacogenomics and Therapeutics/Drug Development

[0235] The present invention provides methods for assessing the pharmacogenomics of a subject harboring particular SNP alleles or haplotypes to a particular therapeutic agent or pharmaceutical compound, or to a class of such compounds. Pharmacogenomics deals with the roles which clinically significant hereditary variations (e.g., SNPs) play in the response to drugs due to altered drug disposition and/or abnormal action in affected persons. See, e.g., Roses, Nature 405, 857-865 (2000); Gould Rothberg, Nature Biotechnology 19, 209-211 (2001); Eichelbaum, Clin. Exp. Pharmacol. Physiol. 23(10-11):983-985 (1996); and Linder, Clin. Chem. 43(2):254-266 (1997). The clinical outcomes of these variations can result in severe toxicity of therapeutic drugs in certain individuals or therapeutic failure of drugs in certain individuals as a result of individual variation in metabolism. Thus, the SNP genotype of an individual can determine the way a therapeutic compound acts on the body or the way the body metabolizes the compound. For example, SNPs in drug metabolizing enzymes can affect the activity of these enzymes, which in turn can affect both the intensity and duration of drug action, as well as drug metabolism and clearance.

[0236] The discovery of SNPs in drug metabolizing enzymes, drug transporters, proteins for pharmaceutical agents, and other drug targets has explained why some patients do not obtain the expected drug effects, show an exaggerated drug effect, or experience serious toxicity from standard drug dosages. SNPs can be expressed in the phenotype of the extensive metabolizer and in the phenotype of the poor metabolizer. Accordingly, SNPs may lead to allelic variants of a protein in which one or more of the protein functions in one population are different from those in another population. SNPs and the encoded variant peptides thus provide targets to ascertain a genetic predisposition that can affect treatment modality. For example, in a ligand-based treatment, SNPs may give rise to amino terminal extracellular domains and/or other ligand-binding regions of a receptor that are more or less active in ligand binding, thereby affecting subsequent protein activation. Accordingly, ligand dosage would necessarily be modified to maximize the therapeutic effect within a given population containing particular SNP alleles or haplotypes.

[0237] As an alternative to genotyping, specific variant proteins containing variant amino acid sequences encoded by alternative SNP alleles could be identified. Thus, pharmacogenomic characterization of an individual permits the selection of effective compounds and effective dosages of such compounds for prophylactic or therapeutic uses based on the individual's SNP genotype, thereby enhancing and optimizing the effectiveness of the therapy. Furthermore, the production of recombinant cells and transgenic animals containing particular SNPs/haplotypes allow effective clinical design and testing of treatment compounds and dosage regimens. For example, transgenic animals can be produced that differ only in specific SNP alleles in a gene that is orthologous to a human disease susceptibility gene.

[0238] Pharmacogenomic uses of the SNPs of the present invention provide several significant advantages for patient care, particularly in treating stenosis. Pharmacogenomic characterization of an individual, based on an individual's SNP genotype, can identify those individuals unlikely to respond to treatment with a particular medication and thereby allows physicians to avoid prescribing the ineffective medication to those individuals. On the other hand, SNP genotyping of an individual may enable physicians to select the appropriate medication and dosage regimen that will be most effective based on an individual's SNP genotype. This information increases a physician's confidence in prescribing medications and motivates patients to comply with their drug regimens. Furthermore, pharmacogenomics may identify patients predisposed to toxicity and adverse reactions to particular drugs or drug dosages. Adverse drug reactions lead to more than 100,000 avoidable deaths per year in the United States alone and therefore represent a significant cause of hospitalization and death, as well as a significant economic burden on the healthcare system (Pfost et. al., Trends in Biotechnology, August 2000.). Thus, pharmacogenomics based on the SNPs disclosed herein has the potential to both save lives and reduce healthcare costs substantially.

[0239] Pharmacogenomics in general is discussed further in Rose et al., “Pharmacogenetic analysis of clinically relevant genetic polymorphisms”, Methods Mol Med. 2003;85:225-37. Pharmacogenomics as it relates to Alzheimer's disease and other neurodegenerative disorders is discussed in Cacabelos, “Pharmacogenomics for the treatment of dementia”, Ann Med. 2002;34(5):357-79, Maimone et al., “Pharmacogenomics of neurodegenerative diseases”, Eur J Pharmacol. 2001 Feb. 9;413(1):11-29, and Poirier, “Apolipoprotein E: a pharmacogenetic target for the treatment of Alzheimer's disease”, Mol Diagn. 1999 December; 4(4):335-41. Pharmacogenomics as it relates to cardiovascular disorders is discussed in Siest et al., “Pharmacogenomics of drugs affecting the cardiovascular system”, Clin Chem Lab Med. 2003 April; 41(4):590-9, Mukherjee et al., “Pharmacogenomics in cardiovascular diseases”, Prog Cardiovasc Dis. 2002 May-June; 44(6):479-98, and Mooser et al., “Cardiovascular pharmacogenetics in the SNP era”, J Thromb Haemost. 2003 July; 1(7):1398-402. Pharmacogenomics as it relates to cancer is discussed in McLeod et al., “Cancer pharmacogenomics: SNPs, chips, and the individual patient”, Cancer Invest. 2003;21(4):630-40 and Watters et al., “Cancer pharmacogenomics: current and future applications”, Biochim Biophys Acta. 2003 Mar. 17; 1603(2):99-111.

[0240] The SNPs of the present invention also can be used to identify novel therapeutic targets for stenosis. For example, genes containing the disease-associated variants (“variant genes”) or their products, as well as genes or their products that are directly or indirectly regulated by or interacting with these variant genes or their products, can be targeted for the development of therapeutics that, for example, treat the disease or prevent or delay disease onset. The therapeutics may be composed of, for example, small molecules, proteins, protein fragments or peptides, antibodies, nucleic acids, or their derivatives or mimetics which modulate the functions or levels of the target genes or gene products.

[0241] The SNP-containing nucleic acid molecules disclosed herein, and their complementary nucleic acid molecules, may be used as antisense constructs to control gene expression in cells, tissues, and organisms. Antisense technology is well established in the art and extensively reviewed in Antisense Drug Technology: Principles, Strategies, and Applications, Crooke (ed.), Marcel Dekker, Inc.: New York (2001). An antisense nucleic acid molecule is generally designed to be complementary to a region of mRNA expressed by a gene so that the antisense molecule hybridizes to the mRNA and thereby blocks translation of mRNA into protein. Various classes of antisense oligonucleotides are used in the art, two of which are cleavers and blockers. Cleavers, by binding to target RNAs, activate intracellular nucleases (e.g., RNaseH or RNase L) that cleave the target RNA. Blockers, which also bind to target RNAs, inhibit protein translation through steric hindrance of ribosomes. Exemplary blockers include peptide nucleic acids, morpholinos, locked nucleic acids, and methylphosphonates (see, e.g., Thompson, Drug Discovery Today, 7 (17): 912-917 (2002)). Antisense oligonucleotides are directly useful as therapeutic agents, and are also useful for determining and validating gene function (e.g., in gene knock-out or knock-down experiments).

[0242] Antisense technology is further reviewed in: Layery et al., “Antisense and RNAi: powerful tools in drug target discovery and validation”, Curr Opin Drug Discov Devel. 2003 July; 6(4):561-9; Stephens et al., “Antisense oligonucleotide therapy in cancer”, Curr Opin Mol Ther. 2003 April; 5(2): 118-22; Kurreck, “Antisense technologies. Improvement through novel chemical modifications”, Eur J. Biochem. 2003 April; 270(8):1628-44; Dias et al., “Antisense oligonucleotides: basic concepts and mechanisms”, Mol Cancer Ther. 2002 March; 1(5):347-55; Chen, “Clinical development of antisense oligonucleotides as anti-cancer therapeutics”, Methods Mol Med. 2003;75:621-36; Wang et al., “Antisense anticancer oligonucleotide therapeutics”, Curr Cancer Drug Targets. 2001 November; 1 (3):177-96; and Bennett, “Efficiency of antisense oligonucleotide drug discovery”, Antisense Nucleic Acid Drug Dev. 2002 June; 12(3):215-24.

[0243] The SNPs of the present invention are particularly useful for designing antisense reagents that are specific for particular nucleic acid variants. Based on the SNP information disclosed herein, antisense oligonucleotides can be produced that specifically target mRNA molecules that contain one or more particular SNP nucleotides. In this manner, expression of mRNA molecules that contain one or more undesired polymorphisms (e.g., SNP nucleotides that lead to a defective protein such as an amino acid substitution in a catalytic domain) can be inhibited or completely blocked. Thus, antisense oligonucleotides can be used to specifically bind a particular polymorphic form (e.g., a SNP allele that encodes a defective protein), thereby inhibiting translation of this form, but which do not bind an alternative polymorphic form (e.g., an alternative SNP nucleotide that encodes a protein having normal function).

[0244] Antisense molecules can be used to inactivate mRNA in order to inhibit gene expression and production of defective proteins. Accordingly, these molecules can be used to treat a disorder, such as stenosis, characterized by abnormal or undesired gene expression or expression of certain defective proteins. This technique can involve cleavage by means of ribozymes containing nucleotide sequences complementary to one or more regions in the mRNA that attenuate the ability of the mRNA to be translated. Possible mRNA regions include, for example, protein-coding regions and particularly protein-coding regions corresponding to catalytic activities, substrate/ligand binding, or other functional activities of a protein.

[0245] The SNPs of the present invention are also useful for designing RNA interference reagents that specifically target nucleic acid molecules having particular SNP variants. RNA interference (RNAi), also referred to as gene silencing, is based on using double-stranded RNA (dsRNA) molecules to turn genes off. When introduced into a cell, dsRNAs are processed by the cell into short fragments (generally about 21-22 bp in length) known as small interfering RNAs (siRNAs) which the cell uses in a sequence-specific manner to recognize and destroy complementary RNAs (Thompson, Drug Discovery Today, 7 (17): 912-917 (2002)). Thus, because RNAi molecules, including siRNAs, act in a sequence-specific manner, the SNPs of the present invention can be used to design RNAi reagents that recognize and destroy nucleic acid molecules having specific SNP alleles/nucleotides (such as deleterious alleles that lead to the production of defective proteins), while not affecting nucleic acid molecules having alternative SNP alleles (such as alleles that encode proteins having normal function). As with antisense reagents, RNAi reagents may be directly useful as therapeutic agents (e.g., for turning off defective, disease-causing genes), and are also useful for characterizing and validating gene function (e.g., in gene knock-out or knock-down experiments).

[0246] The following references provide a further review of RNAi: Agami, “RNAi and related mechanisms and their potential use for therapy”, Curr Opin Chem Biol. 2002 December; 6(6):829-34; Layery et al., “Antisense and RNAi: powerful tools in drug target discovery and validation”, Curr Opin Drug Discov Devel. 2003 July; 6(4):561-9; Shi, “Mammalian RNAi for the masses”, Trends Genet 2003 January; 19(1):9-12), Shuey et al., “RNAi: gene-silencing in therapeutic intervention”, Drug Discovery Today 2002 October; 7(20):1040-1046; McManus et al., Nat Rev Genet 2002 October; 3(10):737-47; Xia et al., Nat Biotechnol 2002 October; 20(10):1006-10; Plasterk et al., Curr Opin Genet Dev 2000 October; 10(5):562-7; Bosher et al., Nat Cell Biol 2000 February; 2(2):E31-6; and Hunter, Curr Biol 1999 Jun. 17;9(12):R440-2).

[0247] A subject suffering from a pathological condition, such as stenosis, ascribed to a SNP may be treated so as to correct the genetic defect (see Kren et al., Proc. Natl. Acad. Sci. USA 96:10349-10354 (1999)). Such a subject can be identified by any method that can detect the polymorphism in a biological sample drawn from the subject. Such a genetic defect may be permanently corrected by administering to such a subject a nucleic acid fragment incorporating a repair sequence that supplies the normal/wild-type nucleotide at the position of the SNP. This site-specific repair sequence can encompass an RNA/DNA oligonucleotide that operates to promote endogenous repair of a subject's genomic DNA. The site-specific repair sequence is administered in an appropriate vehicle, such as a complex with polyethylenimine, encapsulated in anionic liposomes, a viral vector such as an adenovirus, or other pharmaceutical composition that promotes intracellular uptake of the administered nucleic acid. A genetic defect leading to an inborn pathology may then be overcome, as the chimeric oligonucleotides induce incorporation of the normal sequence into the subject's genome. Upon incorporation, the normal gene product is expressed, and the replacement is propagated, thereby engendering a permanent repair and therapeutic enhancement of the clinical condition of the subject.

[0248] In cases in which a cSNP results in a variant protein that is ascribed to be the cause of, or a contributing factor to, a pathological condition, a method of treating such a condition can include administering to a subject experiencing the pathology the wild-type/normal cognate of the variant protein. Once administered in an effective dosing regimen, the wild-type cognate provides complementation or remediation of the pathological condition.

[0249] The invention further provides a method for identifying a compound or agent that can be used to treat stenosis. The SNPs disclosed herein are useful as targets for the identification and/or development of therapeutic agents. A method for identifying a therapeutic agent or compound typically includes assaying the ability of the agent or compound to modulate the activity and/or expression of a SNP-containing nucleic acid or the encoded product and thus identifying an agent or a compound that can be used to treat a disorder characterized by undesired activity or expression of the SNP-containing nucleic acid or the encoded product. The assays can be performed in cell-based and cell-free systems. Cell-based assays can include cells naturally expressing the nucleic acid molecules of interest or recombinant cells genetically engineered to express certain nucleic acid molecules.

[0250] Variant gene expression in a stenosis patient can include, for example, either expression of a SNP-containing nucleic acid sequence (for instance, a gene that contains a SNP can be transcribed into an mRNA transcript molecule containing the SNP, which can in turn be translated into a variant protein) or altered expression of a normal/wild-type nucleic acid sequence due to one or more SNPs (for instance, a regulatory/control region can contain a SNP that affects the level or pattern of expression of a normal transcript).

[0251] Assays for variant gene expression can involve direct assays of nucleic acid levels (e.g., mRNA levels), expressed protein levels, or of collateral compounds involved in a signal pathway. Further, the expression of genes that are up- or down-regulated in response to the signal pathway can also be assayed. In this embodiment, the regulatory regions of these genes can be operably linked to a reporter gene such as luciferase.

[0252] Modulators of variant gene expression can be identified in a method wherein, for example, a cell is contacted with a candidate compound/agent and the expression of mRNA determined. The level of expression of mRNA in the presence of the candidate compound is compared to the level of expression of mRNA in the absence of the candidate compound. The candidate compound can then be identified as a modulator of variant gene expression based on this comparison and be used to treat a disorder such as stenosis that is characterized by variant gene expression (e.g., either expression of a SNP-containing nucleic acid or altered expression of a normal/wild-type nucleic acid molecule due to one or more SNPs that affect expression of the nucleic acid molecule) due to one or more SNPs of the present invention. When expression of mRNA is statistically significantly greater in the presence of the candidate compound than in its absence, the candidate compound is identified as a stimulator of nucleic acid expression. When nucleic acid expression is statistically significantly less in the presence of the candidate compound than in its absence, the candidate compound is identified as an inhibitor of nucleic acid expression.

[0253] The invention further provides methods of treatment, with the SNP or associated nucleic acid domain (e.g., catalytic domain, ligand/substrate-binding domain, regulatory/control region, etc.) or gene, or the encoded mRNA transcript, as a target, using a compound identified through drug screening as a gene modulator to modulate variant nucleic acid expression. Modulation can include either up-regulation (i.e., activation or agonization) or down-regulation (i.e., suppression or antagonization) of nucleic acid expression.

[0254] Expression of mRNA transcripts and encoded proteins, either wild type or variant, may be altered in individuals with a particular SNP allele in a regulatory/control element, such as a promoter or transcription factor binding domain, that regulates expression. In this situation, methods of treatment and compounds can be identified, as discussed herein, that regulate or overcome the variant regulatory/control element, thereby generating normal, or healthy, expression levels of either the wild type or variant protein.

[0255] The SNP-containing nucleic acid molecules of the present invention are also useful for monitoring the effectiveness of modulating compounds on the expression or activity of a variant gene, or encoded product, in clinical trials or in a treatment regimen. Thus, the gene expression pattern can serve as an indicator for the continuing effectiveness of treatment with the compound, particularly with compounds to which a patient can develop resistance, as well as an indicator for toxicities. The gene expression pattern can also serve as a marker indicative of a physiological response of the affected cells to the compound. Accordingly, such monitoring would allow either increased administration of the compound or the administration of alternative compounds to which the patient has not become resistant. Similarly, if the level of nucleic acid expression falls below a desirable level, administration of the compound could be commensurately decreased.

[0256] In another aspect of the present invention, there is provided a pharmaceutical pack comprising a therapeutic agent (e.g., a small molecule drug, antibody, peptide, antisense or RNAi nucleic acid molecule, etc.) and a set of instructions for administration of the therapeutic agent to humans diagnostically tested for one or more SNPs or SNP haplotypes provided by the present invention.

[0257] The SNPs/haplotypes of the present invention are also useful for improving many different aspects of the drug development process. For example, individuals can be selected for clinical trials based on their SNP genotype. Individuals with SNP genotypes that indicate that they are most likely to respond to the drug can be included in the trials and those individuals whose SNP genotypes indicate that they are less likely to or would not respond to the drug, or suffer adverse reactions, can be eliminated from the clinical trials. This not only improves the safety of clinical trials, but also will enhance the chances that the trial will demonstrate statistically significant efficacy. Furthermore, the SNPs of the present invention may explain why certain previously developed drugs performed poorly in clinical trials and may help identify a subset of the population that would benefit from a drug that had previously performed poorly in clinical trials, thereby “rescuing” previously developed drugs, and enabling the drug to be made available to a particular stenosis patient population that can benefit from it.

[0258] SNPs have many important uses in drug discovery, screening, and development. A high probability exists that, for any gene/protein selected as a potential drug target, variants of that gene/protein will exist in a patient population. Thus, determining the impact of gene/protein variants on the selection and delivery of a therapeutic agent should be an integral aspect of the drug discovery and development process. (Jazwinska, A Trends Guide to Genetic Variation and Genomic Medicine, 2002 March; S30-S36).

[0259] Knowledge of variants (e.g., SNPs and any corresponding amino acid polymorphisms) of a particular therapeutic target (e.g., a gene, mRNA transcript, or protein) enables parallel screening of the variants in order to identify therapeutic candidates (e.g., small molecule compounds, antibodies, antisense or RNAi nucleic acid compounds, etc.) that demonstrate efficacy across variants (Rothberg, Nat Biotechnol 2001 March; 19(3):209-11). Such therapeutic candidates would be expected to show equal efficacy across a larger segment of the patient population, thereby leading to a larger potential market for the therapeutic candidate.

[0260] Furthermore, identifying variants of a potential therapeutic target enables the most common form of the target to be used for selection of therapeutic candidates, thereby helping to ensure that the experimental activity that is observed for the selected candidates reflects the real activity expected in the largest proportion of a patient population (Jazwinska, A Trends Guide to Genetic Variation and Genomic Medicine, 2002 March; S30-S36).

[0261] Additionally, screening therapeutic candidates against all known variants of a target can enable the early identification of potential toxicities and adverse reactions relating to particular variants. For example, variability in drug absorption, distribution, metabolism and excretion (ADME) caused by, for example, SNPs in therapeutic targets or drug metabolizing genes, can be identified, and this information can be utilized during the drug development process to minimize variability in drug disposition and develop therapeutic agents that are safer across a wider range of a patient population. The SNPs of the present invention, including the variant proteins and encoding polymorphic nucleic acid molecules provided in Tables 1-2, are useful in conjunction with a variety of toxicology methods established in the art, such as those set forth in Current Protocols in Toxicology, John Wiley & Sons, Inc., N.Y.

[0262] Furthermore, therapeutic agents that target any art-known proteins (or nucleic acid molecules, either RNA or DNA) may cross-react with the variant proteins (or polymorphic nucleic acid molecules) disclosed in Table 1, thereby significantly affecting the pharmacokinetic properties of the drug. Consequently, the protein variants and the SNP-containing nucleic acid molecules disclosed in Tables 1-2 are useful in developing, screening, and evaluating therapeutic agents that target corresponding art-known protein forms (or nucleic acid molecules). Additionally, as discussed above, knowledge of all polymorphic forms of a particular drug target enables the design of therapeutic agents that are effective against most or all such polymorphic forms of the drug target.

[0263] Pharmaceutical Compositions and Administration Thereof

[0264] Any of the stenosis-associated proteins, and encoding nucleic acid molecules, disclosed herein can be used as therapeutic targets (or directly used themselves as therapeutic compounds) for treating stenosis and related pathologies, and the present disclosure enables therapeutic compounds (e.g., small molecules, antibodies, therapeutic proteins, RNAi and antisense molecules, etc.) to be developed that target (or are comprised of) any of these therapeutic targets.

[0265] In general, a therapeutic compound will be administered in a therapeutically effective amount by any of the accepted modes of administration for agents that serve similar utilities. The actual amount of the therapeutic compound of this invention, i.e., the active ingredient, will depend upon numerous factors such as the severity of the disease to be treated, the age and relative health of the subject, the potency of the compound used, the route and form of administration, and other factors.

[0266] Therapeutically effective amounts of therapeutic compounds may range from, for example, approximately 0.01-50 mg per kilogram body weight of the recipient per day; preferably about 0.1-20 mg/kg/day. Thus, as an example, for administration to a 70 kg person, the dosage range would most preferably be about 7 mg to 1.4 g per day.

[0267] In general, therapeutic compounds will be administered as pharmaceutical compositions by any one of the following routes: oral, systemic (e.g., transdermal, intranasal, or by suppository), or parenteral (e.g., intramuscular, intravenous, or subcutaneous) administration. The preferred manner of administration is oral or parenteral using a convenient daily dosage regimen, which can be adjusted according to the degree of affliction. Oral compositions can take the form of tablets, pills, capsules, semisolids, powders, sustained release formulations, solutions, suspensions, elixirs, aerosols, or any other appropriate compositions.

[0268] The choice of formulation depends on various factors such as the mode of drug administration (e.g., for oral administration, formulations in the form of tablets, pills, or capsules are preferred) and the bioavailability of the drug substance. Recently, pharmaceutical formulations have been developed especially for drugs that show poor bioavailability based upon the principle that bioavailability can be increased by increasing the surface area, i.e., decreasing particle size. For example, U.S. Pat. No. 4,107,288 describes a pharmaceutical formulation having particles in the size range from 10 to 1,000 nm in which the active material is supported on a cross-linked matrix of macromolecules. U.S. Pat. No. 5,145,684 describes the production of a pharmaceutical formulation in which the drug substance is pulverized to nanoparticles (average particle size of 400 nm) in the presence of a surface modifier and then dispersed in a liquid medium to give a pharmaceutical formulation that exhibits remarkably high bioavailability.

[0269] Pharmaceutical compositions are comprised of, in general, a therapeutic compound in combination with at least one pharmaceutically acceptable excipient. Acceptable excipients are non-toxic, aid administration, and do not adversely affect the therapeutic benefit of the therapeutic compound. Such excipients may be any solid, liquid, semi-solid or, in the case of an aerosol composition, gaseous excipient that is generally available to one skilled in the art.

[0270] Solid pharmaceutical excipients include starch, cellulose, talc, glucose, lactose, sucrose, gelatin, malt, rice, flour, chalk, silica gel, magnesium stearate, sodium stearate, glycerol monostearate, sodium chloride, dried skim milk and the like. Liquid and semisolid excipients may be selected from glycerol, propylene glycol, water, ethanol and various oils, including those of petroleum, animal, vegetable or synthetic origin, e.g., peanut oil, soybean oil, mineral oil, sesame oil, etc. Preferred liquid carriers, particularly for injectable solutions, include water, saline, aqueous dextrose, and glycols.

[0271] Compressed gases may be used to disperse a compound of this invention in aerosol form. Inert gases suitable for this purpose are nitrogen, carbon dioxide, etc.

[0272] Other suitable pharmaceutical excipients and their formulations are described in Remington's Pharmaceutical Sciences, edited by E. W. Martin (Mack Publishing Company, 18th ed., 1990).

[0273] The amount of the therapeutic compound in a formulation can vary within the full range employed by those skilled in the art. Typically, the formulation will contain, on a weight percent (wt %) basis, from about 0.01-99.99 wt % of the therapeutic compound based on the total formulation, with the balance being one or more suitable pharmaceutical excipients. Preferably, the compound is present at a level of about 1-80 wt %.

[0274] Therapeutic compounds can be administered alone or in combination with other therapeutic compounds or in combination with one or more other active ingredient(s). For example, an inhibitor or stimulator of a stenosis-associated protein can be administered in combination with another agent that inhibits or stimulates the activity of the same or a different stenosis-associated protein to thereby counteract the affects of stenosis.

[0275] For further information regarding pharmacology, see Current Protocols in Pharmacology, John Wiley & Sons, Inc., N.Y.

[0276] Human Identification Applications

[0277] In addition to their diagnostic and therapeutic uses in stenosis and related pathologies, the SNPs provided by the present invention are also useful as human identification markers for such applications as forensics, paternity testing, and biometrics (see, e.g., Gill, “An assessment of the utility of single nucleotide polymorphisms (SNPs) for forensic purposes”, Int J Legal Med. 2001;114(4-5):204-10). Genetic variations in the nucleic acid sequences between individuals can be used as genetic markers to identify individuals and to associate a biological sample with an individual. Determination of which nucleotides occupy a set of SNP positions in an individual identifies a set of SNP markers that distinguishes the individual. The more SNP positions that are analyzed, the lower the probability that the set of SNPs in one individual is the same as that in an unrelated individual. Preferably, if multiple sites are analyzed, the sites are unlinked (i.e., inherited independently). Thus, preferred sets of SNPs can be selected from among the SNPs disclosed herein, which may include SNPs on different chromosomes, SNPs on different chromosome arms, and/or SNPs that are dispersed over substantial distances along the same chromosome arm.

[0278] Furthermore, among the SNPs disclosed herein, preferred SNPs for use in certain forensic/human identification applications include SNPs located at degenerate codon positions (i.e., the third position in certain codons which can be one of two or more alternative nucleotides and still encode the same amino acid), since these SNPs do not affect the encoded protein. SNPs that do not affect the encoded protein are expected to be under less selective pressure and are therefore expected to be more polymorphic in a population, which is typically an advantage for forensic/human identification applications. However, for certain forensics/human identification applications, such as predicting phenotypic characteristics (e.g., inferring ancestry or inferring one or more physical characteristics of an individual) from a DNA sample, it may be desirable to utilize SNPs that affect the encoded protein.

[0279] For many of the SNPs disclosed in Tables 1-2 (which are identified as “Applera” SNP source), Tables 1-2 provide SNP allele frequencies obtained by re-sequencing the DNA of chromosomes from 39 individuals (Tables 1-2 also provide allele frequency information for “Celera” source SNPs and, where available, public SNPs from dbEST, HGBASE, and/or HGMD). The allele frequencies provided in Tables 1-2 enable these SNPs to be readily used for human identification applications. Although any SNP disclosed in Table 1 and/or Table 2 could be used for human identification, the closer that the frequency of the minor allele at a particular SNP site is to 50%, the greater the ability of that SNP to discriminate between different individuals in a population since it becomes increasingly likely that two randomly selected individuals would have different alleles at that SNP site. Using the SNP allele frequencies provided in Tables 1-2, one of ordinary skill in the art could readily select a subset of SNPs for which the frequency of the minor allele is, for example, at least 1%, 2%, 5%, 10%, 20%, 25%, 30%, 40%, 45%, or 50%, or any other frequency in-between. Thus, since Tables 1-2 provide allele frequencies based on the re-sequencing of the chromosomes from 39 individuals, a subset of SNPs could readily be selected for human identification in which the total allele count of the minor allele at a particular SNP site is, for example, at least 1, 2, 4, 8, 10, 16, 20, 24, 30, 32, 36, 38, 39, 40, or any other number in-between.

[0280] Furthermore, Tables 1-2 also provide population group (interchangeably referred to herein as ethnic or racial groups) information coupled with the extensive allele frequency information. For example, the group of 39 individuals whose DNA was re-sequenced was made-up of 20 Caucasians and 19 African-Americans. This population group information enables further refinement of SNP selection for human identification. For example, preferred SNPs for human identification can be selected from Tables 1-2 that have similar allele frequencies in both the Caucasian and African-American populations; thus, for example, SNPs can be selected that have equally high discriminatory power in both populations. Alternatively, SNPs can be selected for which there is a statistically significant difference in allele frequencies between the Caucasian and African-American populations (as an extreme example, a particular allele may be observed only in either the Caucasian or the African-American population group but not observed in the other population group); such SNPs are useful, for example, for predicting the race/ethnicity of an unknown perpetrator from a biological sample such as a hair or blood stain recovered at a crime scene. For a discussion of using SNPs to predict ancestry from a DNA sample, including statistical methods, see Frudakis et al., “A Classifier for the SNP-Based Inference of Ancestry”, Journal of Forensic Sciences 2003; 48(4):771-782.

[0281] SNPs have numerous advantages over other types of polymorphic markers, such as short tandem repeats (STRs). For example, SNPs can be easily scored and are amenable to automation, making SNPs the markers of choice for large-scale forensic databases. SNPs are found in much greater abundance throughout the genome than repeat polymorphisms. Population frequencies of two polymorphic forms can usually be determined with greater accuracy than those of multiple polymorphic forms at multi-allelic loci. SNPs are mutationaly more stable than repeat polymorphisms. SNPs are not susceptible to artefacts such as stutter bands that can hinder analysis. Stutter bands are frequently encountered when analyzing repeat polymorphisms, and are particularly troublesome when analyzing samples such as crime scene samples that may contain mixtures of DNA from multiple sources. Another significant advantage of SNP markers over STR markers is the much shorter length of nucleic acid needed to score a SNP. For example, STR markers are generally several hundred base pairs in length. A SNP, on the other hand, comprises a single nucleotide, and generally a short conserved region on either side of the SNP position for primer and/or probe binding. This makes SNPs more amenable to typing in highly degraded or aged biological samples that are frequently encountered in forensic casework in which DNA may be fragmented into short pieces.

[0282] SNPs also are not subject to microvariant and “off-ladder” alleles frequently encountered when analyzing STR loci. Microvariants are deletions or insertions within a repeat unit that change the size of the amplified DNA product so that the amplified product does not migrate at the same rate as reference alleles with normal sized repeat units. When separated by size, such as by electrophoresis on a polyacrylamide gel, microvariants do not align with a reference allelic ladder of standard sized repeat units, but rather migrate between the reference alleles. The reference allelic ladder is used for precise sizing of alleles for allele classification; therefore alleles that do not align with the reference allelic ladder lead to substantial analysis problems. Furthermore, when analyzing multi-allelic repeat polymorphisms, occasionally an allele is found that consists of more or less repeat units than has been previously seen in the population, or more or less repeat alleles than are included in a reference allelic ladder. These alleles will migrate outside the size range of known alleles in a reference allelic ladder, and therefore are referred to as “off-ladder” alleles. In extreme cases, the allele may contain so few or so many repeats that it migrates well out of the range of the reference allelic ladder. In this situation, the allele may not even be observed, or, with multiplex analysis, it may migrate within or close to the size range for another locus, further confounding analysis.

[0283] SNP analysis avoids the problems of microvariants and off-ladder alleles encountered in STR analysis. Importantly, microvariants and off-ladder alleles may provide significant problems, and may be completely missed, when using analysis methods such as oligonucleotide hybridization arrays, which utilize oligonucleotide probes specific for certain known alleles. Furthermore, off-ladder alleles and microvariants encountered with STR analysis, even when correctly typed, may lead to improper statistical analysis, since their frequencies in the population are generally unknown or poorly characterized, and therefore the statistical significance of a matching genotype may be questionable. All these advantages of SNP analysis are considerable in light of the consequences of most DNA identification cases, which may lead to life imprisonment for an individual, or re-association of remains to the family of a deceased individual.

[0284] DNA can be isolated from biological samples such as blood, bone, hair, saliva, or semen, and compared with the DNA from a reference source at particular SNP positions.

[0285] Multiple SNP markers can be assayed simultaneously in order to increase the power of discrimination and the statistical significance of a matching genotype. For example, oligonucleotide arrays can be used to genotype a large number of SNPs simultaneously. The SNPs provided by the present invention can be assayed in combination with other polymorphic genetic markers, such as other SNPs known in the art or STRs, in order to identify an individual or to associate an individual With a particular biological sample.

[0286] Furthermore, the SNPs provided by the present invention can be genotyped for inclusion in a database of DNA genotypes, for example, a criminal DNA databank such as the FBI's Combined DNA Index System (CODIS) database. A genotype obtained from a biological sample of unknown source can then be queried against the database to find a matching genotype, with the SNPs of the present invention providing nucleotide positions at which to compare the known and unknown DNA sequences for identity. Accordingly, the present invention provides a database comprising novel SNPs or SNP alleles of the present invention (e.g., the database can comprise information indicating which alleles are possessed by individual members of a population at one or more novel SNP sites of the present invention), such as for use in forensics, biometrics, or other human identification applications. Such a database typically comprises a computer-based system in which the SNPs or SNP alleles of the present invention are recorded on a computer readable medium (see the section of the present specification entitled “Computer-Related Embodiments”).

[0287] The SNPs of the present invention can also be assayed for use in paternity testing. The object of paternity testing is usually to determine whether a male is the father of a child. In most cases, the mother of the child is known and thus, the mother's contribution to the child's genotype can be traced. Paternity testing investigates whether the part of the child's genotype not attributable to the mother is consistent with that of the putative father. Paternity testing can be performed by analyzing sets of polymorphisms in the putative father and the child, with the SNPs of the present invention providing nucleotide positions at which to compare the putative father's and child's DNA sequences for identity. If the set of polymorphisms in the child attributable to the father does not match the set of polymorphisms of the putative father, it can be concluded, barring experimental error, that the putative father is not the father of the child. If the set of polymorphisms in the child attributable to the father match the set of polymorphisms of the putative father, a statistical calculation can be performed to determine the probability of coincidental match, and a conclusion drawn as to the likelihood that the putative father is the true biological father of the child.

[0288] In addition to paternity testing, SNPs are also useful for other types of kinship testing, such as for verifying familial relationships for immigration purposes, or for cases in which an individual alleges to be related to a deceased individual in order to claim an inheritance from the deceased individual, etc. For further information regarding the utility of SNPs for paternity testing and other types of kinship testing, including methods for statistical analysis, see Krawczak, “Informativity assessment for biallelic single nucleotide polymorphisms”, Electrophoresis 1999 June; 20(8):1676-81.

[0289] The use of the SNPs of the present invention for human identification further extends to various authentication systems, commonly referred to as biometric systems, which typically convert physical characteristics of humans (or other organisms) into digital data. Biometric systems include various technological devices that measure such unique anatomical or physiological characteristics as finger, thumb, or palm prints; hand geometry; vein patterning on the back of the hand; blood vessel patterning of the retina and color and texture of the iris; facial characteristics; voice patterns; signature and typing dynamics; and DNA. Such physiological measurements can be used to verify identity and, for example, restrict or allow access based on the identification. Examples of applications for biometrics include physical area security, computer and network security, aircraft passenger check-in and boarding, financial transactions, medical records access, government benefit distribution, voting, law enforcement, passports, visas and immigration, prisons, various military applications, and for restricting access to expensive or dangerous items, such as automobiles or guns (see, for example, O'Connor, Stanford Technology Law Review and U.S. Pat. No. 6,119,096).

[0290] Groups of SNPs, particularly the SNPs provided by the present invention, can be typed to uniquely identify an individual for biometric applications such as those described above. Such SNP typing can readily be accomplished using, for example, DNA chips/arrays. Preferably, a minimally invasive means for obtaining a DNA sample is utilized. For example, PCR amplification enables sufficient quantities of DNA for analysis to be obtained from buccal swabs or fingerprints, which contain DNA-containing skin cells and oils that are naturally transferred during contact.

[0291] Further information regarding techniques for using SNPs in forensic/human identification applications can be found in, for example, Current Protocols in Human Genetics, John Wiley & Sons, N.Y. (2002), 14.1-14.7.

[0292] Variant Proteins, Antibodies, Vectors & Host Cells, & Uses Thereof

[0293] Variant Proteins Encoded by SNP-Containing Nucleic Acid Molecules

[0294] The present invention provides SNP-containing nucleic acid molecules, many of which encode proteins having variant amino acid sequences as compared to the art-known (i.e., wild-type) proteins. Amino acid sequences encoded by the polymorphic nucleic acid molecules of the present invention are provided as SEQ ID NOS:285-568 in Table 1 and the Sequence Listing. These variants will generally be referred to herein as variant proteins/peptides/polypeptides, or polymorphic proteins/peptides/polypeptides of the present invention. The terms “protein”, “peptide”, and “polypeptide” are used herein interchangeably.

[0295] A variant protein of the present invention may be encoded by, for example, a nonsynonymous nucleotide substitution at any one of the cSNP positions disclosed herein. In addition, variant proteins may also include proteins whose expression, structure, and/or function is altered by a SNP disclosed herein, such as a SNP that creates or destroys a stop codon, a SNP that affects splicing, and a SNP in control/regulatory elements, e.g. promoters, enhancers, or transcription factor binding domains.

[0296] As used herein, a protein or peptide is said to be “isolated” or “purified” when it is substantially free of cellular material or chemical precursors or other chemicals. The variant proteins of the present invention can be purified to homogeneity or other lower degrees of purity. The level of purification will be based on the intended use. The key feature is that the preparation allows for the desired function of the variant protein, even if in the presence of considerable amounts of other components.

[0297] As used herein, “substantially free of cellular material” includes preparations of the variant protein having less than about 30% (by dry weight) other proteins (i.e., contaminating protein), less than about 20% other proteins, less than about 10% other proteins, or less than about 5% other proteins. When the variant protein is recombinantly produced, it can also be substantially free of culture medium, i.e., culture medium represents less than about 20% of the volume of the protein preparation.

[0298] The language “substantially free of chemical precursors or other chemicals” includes preparations of the variant protein in which it is separated from chemical precursors or other chemicals that are involved in its synthesis. In one embodiment, the language “substantially free of chemical precursors or other chemicals” includes preparations of the variant protein having less than about 30% (by dry weight) chemical precursors or other chemicals, less than about 20% chemical precursors or other chemicals, less than about 10% chemical precursors or other chemicals, or less than about 5% chemical precursors or other chemicals.

[0299] An isolated variant protein may be purified from cells that naturally express it, purified from cells that have been altered to express it (recombinant host cells), or synthesized using known protein synthesis methods. For example, a nucleic acid molecule containing SNP(s) encoding the variant protein can be cloned into an expression vector, the expression vector introduced into a host cell, and the variant protein expressed in the host cell. The variant protein can then be isolated from the cells by any appropriate purification scheme using standard protein purification techniques. Examples of these techniques are described in detail below (Sambrook and Russell, 2000, Molecular Cloning: A Laboratory Manual, Cold Spring Harbor Laboratory Press, Cold Spring Harbor, N.Y.).

[0300] The present invention provides isolated variant proteins that comprise, consist of or consist essentially of amino acid sequences that contain one or more variant amino acids encoded by one or more codons which contain a SNP of the present invention.

[0301] Accordingly, the present invention provides variant proteins that consist of amino acid sequences that contain one or more amino acid polymorphisms (or truncations or extensions due to creation or destruction of a stop codon, respectively) encoded by the SNPs provided in Table 1 and/or Table 2. A protein consists of an amino acid sequence when the amino acid sequence is the entire amino acid sequence of the protein.

[0302] The present invention further provides variant proteins that consist essentially of amino acid sequences that contain one or more amino acid polymorphisms (or truncations or extensions due to creation or destruction of a stop codon, respectively) encoded by the SNPs provided in Table 1 and/or Table 2. A protein consists essentially of an amino acid sequence when such an amino acid sequence is present with only a few additional amino acid residues in the final protein.

[0303] The present invention further provides variant proteins that comprise amino acid sequences that contain one or more amino acid polymorphisms (or truncations or extensions due to creation or destruction of a stop codon, respectively) encoded by the SNPs provided in Table 1 and/or Table 2. A protein comprises an amino acid sequence when the amino acid sequence is at least part of the final amino acid sequence of the protein. In such a fashion, the protein may contain only the variant amino acid sequence or have additional amino acid residues, such as a contiguous encoded sequence that is naturally associated with it or heterologous amino acid residues. Such a protein can have a few additional amino acid residues or can comprise many more additional amino acids. A brief description of how various types of these proteins can be made and isolated is provided below.

[0304] The variant proteins of the present invention can be attached to heterologous sequences to form chimeric or fusion proteins. Such chimeric and fusion proteins comprise a variant protein operatively linked to a heterologous protein having an amino acid sequence not substantially homologous to the variant protein. “Operatively linked” indicates that the coding sequences for the variant protein and the heterologous protein are ligated in-frame. The heterologous protein can be fused to the N-terminus or C-terminus of the variant protein. In another embodiment, the fusion protein is encoded by a fusion polynucleotide that is synthesized by conventional techniques including automated DNA synthesizers. Alternatively, PCR amplification of gene fragments can be carried out using anchor primers which give rise to complementary overhangs between two consecutive gene fragments which can subsequently be annealed and re-amplified to generate a chimeric gene sequence (see Ausubel et al., Current Protocols in Molecular Biology, 1992). Moreover, many expression vectors are commercially available that already encode a fusion moiety (e.g., a GST protein). A variant protein-encoding nucleic acid can be cloned into such an expression vector such that the fusion moiety is linked in-frame to the variant protein.

[0305] In many uses, the fusion protein does not affect the activity of the variant protein. The fusion protein can include, but is not limited to, enzymatic fusion proteins, for example, beta-galactosidase fusions, yeast two-hybrid GAL fusions, poly-His fusions, MYC-tagged, HI-tagged and Ig fusions. Such fusion proteins, particularly poly-His fusions, can facilitate their purification following recombinant expression. In certain host cells (e.g., mammalian host cells), expression and/or secretion of a protein can be increased by using a heterologous signal sequence. Fusion proteins are further described in, for example, Terpe, “Overview of tag protein fusions: from molecular and biochemical fundamentals to commercial systems”, Appl Microbiol Biotechnol. 2003 January; 60(5):523-33. Epub 2002 Nov. 7; Graddis et al., “Designing proteins that work using recombinant technologies”, Curr Pharm Biotechnol. 2002 December; 3(4):285-97; and Nilsson et al., “Affinity fusion strategies for detection, purification, and immobilization of recombinant proteins”, Protein Expr Purif 1997 October; 11(1):1-16. The present invention also relates to further obvious variants of the variant polypeptides of the present invention, such as naturally-occurring mature forms (e.g., alleleic variants), non-naturally occurring recombinantly-derived variants, and orthologs and paralogs of such proteins that share sequence homology. Such variants can readily be generated using art-known techniques in the fields of recombinant nucleic acid technology and protein biochemistry. It is understood, however, that variants exclude those known in the prior art before the present invention.

[0306] Further variants of the variant polypeptides disclosed in Table 1 can comprise an amino acid sequence that shares at least 70-80%, 80-85%, 85-90%, 91%, 92%, 93%, 94%, 95%, 96%, 97%, 98%, or 99% sequence identity with an amino acid sequence disclosed in Table 1 (or a fragment thereof) and that includes a novel amino acid residue (allele) disclosed in Table 1 (which is encoded by a novel SNP allele). Thus, the present invention specifically contemplates polypeptides that have a certain degree of sequence variation compared with the polypeptide sequences shown in Table 1, but that contain a novel amino acid residue (allele) encoded by a novel SNP allele disclosed herein. In other words, as long as a polypeptide contains a novel amino acid residue disclosed herein, other portions of the polypeptide that flank the novel amino acid residue can vary to some degree from the polypeptide sequences shown in Table 1.

[0307] Full-length pre-processed forms, as well as mature processed forms, of proteins that comprise one of the amino acid sequences disclosed herein can readily be identified as having complete sequence identity to one of the variant proteins of the present invention as well as being encoded by the same genetic locus as the variant proteins provided herein.

[0308] Orthologs of a variant peptide can readily be identified as having some degree of significant sequence homology/identity to at least a portion of a variant peptide as well as being encoded by a gene from another organism. Preferred orthologs will be isolated from non-human mammals, preferably primates, for the development of human therapeutic targets and agents. Such orthologs can be encoded by a nucleic acid sequence that hybridizes to a variant peptide-encoding nucleic acid molecule under moderate to stringent conditions depending on the degree of relatedness of the two organisms yielding the homologous proteins.

[0309] Variant proteins include, but are not limited to, proteins containing deletions, additions and substitutions in the amino acid sequence caused by the SNPs of the present invention. One class of substitutions is conserved amino acid substitutions in which a given amino acid in a polypeptide is substituted for another amino acid of like characteristics. Typical conservative substitutions are replacements, one for another, among the aliphatic amino acids Ala, Val, Leu, and Ile; interchange of the hydroxyl residues Ser and Thr; exchange of the acidic residues Asp and Glu; substitution between the amide residues Asn and Gln; exchange of the basic residues Lys and Arg; and replacements among the aromatic residues Phe and Tyr. Guidance concerning which amino acid changes are likely to be phenotypically silent are found in, for example, Bowie et al., Science 247:1306-1310 (1990).

[0310] Variant proteins can be fully functional or can lack function in one or more activities, e.g. ability to bind another molecule, ability to catalyze a substrate, ability to mediate signaling, etc. Fully functional variants typically contain only conservative variations or variations in non-critical residues or in non-critical regions. Functional variants can also contain substitution of similar amino acids that result in no change or an insignificant change in function. Alternatively, such substitutions may positively or negatively affect function to some degree. Non-functional variants typically contain one or more non-conservative amino acid substitutions, deletions, insertions, inversions, truncations or extensions, or a substitution, insertion, inversion, or deletion of a critical residue or in a critical region.

[0311] Amino acids that are essential for function of a protein can be identified by methods known in the art, such as site-directed mutagenesis or alanine-scanning mutagenesis (Cunningham et al., Science 244:1081-1085 (1989)), particularly using the amino acid sequence and polymorphism information provided in Table 1. The latter procedure introduces single alanine mutations at every residue in the molecule. The resulting mutant molecules are then tested for biological activity such as enzyme activity or in assays such as an in vitro proliferative activity. Sites that are critical for binding partner/substrate binding can also be determined by structural analysis such as crystallization, nuclear magnetic resonance or photoaffinity labeling (Smith et al., J. Mol. Biol. 224:899-904 (1992); de Vos et al. Science 255:306-312 (1992)).

[0312] Polypeptides can contain amino acids other than the 20 amino acids commonly referred to as the 20 naturally occurring amino acids. Further, many amino acids, including the terminal amino acids, may be modified by natural processes, such as processing and other post-translational modifications, or by chemical modification techniques well known in the art. Accordingly, the variant proteins of the present invention also encompass derivatives or analogs in which a substituted amino acid residue is not one encoded by the genetic code, in which a substituent group is included, in which the mature polypeptide is fused with another compound, such as a compound to increase the half-life of the polypeptide (e.g., polyethylene glycol), or in which additional amino acids are fused to the mature polypeptide, such as a leader or secretory sequence or a sequence for purification of the mature polypeptide or a pro-protein sequence.

[0313] Known protein modifications include, but are not limited to, acetylation, acylation, ADP-ribosylation, amidation, covalent attachment of flavin, covalent attachment of a heme moiety, covalent attachment of a nucleotide or nucleotide derivative, covalent attachment of a lipid or lipid derivative, covalent attachment of phosphotidylinositol, cross-linking, cyclization, disulfide bond formation, demethylation, formation of covalent crosslinks, formation of cystine, formation of pyroglutamate, formylation, gamma carboxylation, glycosylation, GPI anchor formation, hydroxylation, iodination, methylation, myristoylation, oxidation, proteolytic processing, phosphorylation, prenylation, racemization, selenoylation, sulfation, transfer-RNA mediated addition of amino acids to proteins such as arginylation, and ubiquitination.

[0314] Such protein modifications are well known to those of skill in the art and have been described in great detail in the scientific literature. Several particularly common modifications, glycosylation, lipid attachment, sulfation, gamma-carboxylation of glutamic acid residues, hydroxylation and ADP-ribosylation, for instance, are described in most basic texts, such as Proteins—Structure and Molecular Properties, 2nd Ed., T. E. Creighton, W. H. Freeman and Company, New York (1993); Wold, F., Posttranslational Covalent Modification of Proteins, B. C. Johnson, Ed., Academic Press, New York 1-12 (1983); Seifter et al., Meth. Enzymol. 182: 626-646 (1990); and Rattan et al., Ann. N.Y. Acad. Sci. 663:48-62 (1992).

[0315] The present invention further provides fragments of the variant proteins in which the fragments contain one or more amino acid sequence variations (e.g., substitutions, or truncations or extensions due to creation or destruction of a stop codon) encoded by one or more SNPs disclosed herein. The fragments to which the invention pertains, however, are not to be construed as encompassing fragments that have been disclosed in the prior art before the present invention.

[0316] As used herein, a fragment may comprise at least about 4, 8, 10, 12, 14, 16, 18, 20, 25, 30, 50, 100 (or any other number in-between) or more contiguous amino acid residues from a variant protein, wherein at least one amino acid residue is affected by a SNP of the present invention, e.g., a variant amino acid residue encoded by a nonsynonymous nucleotide substitution at a cSNP position provided by the present invention. The variant amino acid encoded by a cSNP may occupy any residue position along the sequence of the fragment. Such fragments can be chosen based on the ability to retain one or more of the biological activities of the variant protein or the ability to perform a function, e.g., act as an immunogen. Particularly important fragments are biologically active fragments. Such fragments will typically comprise a domain or motif of a variant protein of the present invention, e.g., active site, transmembrane domain, or ligand/substrate binding domain. Other fragments include, but are not limited to, domain or motif-containing fragments, soluble peptide fragments, and fragments containing immunogenic structures. Predicted domains and functional sites are readily identifiable by computer programs well known to those of skill in the art (e.g., PROSITE analysis) (Current Protocols in Protein Science, John Wiley & Sons, N.Y. (2002)).

[0317] Uses of Variant Proteins

[0318] The variant proteins of the present invention can be used in a variety of ways, including but not limited to, in assays to determine the biological activity of a variant protein, such as in a panel of multiple proteins for high-throughput screening; to raise antibodies or to elicit another type of immune response; as a, reagent (including the labeled reagent) in assays designed to quantitatively determine levels of the variant protein (or its binding partner) in biological fluids; as a marker for cells or tissues in which it is preferentially expressed (either constitutively or at a particular stage of tissue differentiation or development or in a disease state); as a target for screening for a therapeutic agent; and as a direct therapeutic agent to be administered into a human subject. Any of the variant proteins disclosed herein may be developed into reagent grade or kit format for commercialization as research products. Methods for performing the uses listed above are well known to those skilled in the art (see, e.g., Molecular Cloning: A Laboratory Manual, Cold Spring Harbor Laboratory Press, Sambrook and Russell, 2000, and Methods in Enzymology: Guide to Molecular Cloning Techniques, Academic Press, Berger, S. L. and A. R. Kimmel eds., 1987).

[0319] In a specific embodiment of the invention, the methods of the present invention include detection of one or more variant proteins disclosed herein. Variant proteins are disclosed in Table 1 and in the Sequence Listing as SEQ ID NOS: 285-568. Detection of such proteins can be accomplished using, for example, antibodies, small molecule compounds, aptamers, ligands/substrates, other proteins or protein fragments, or other protein-binding agents. Preferably, protein detection agents are specific for a variant protein of the present invention and can therefore discriminate between a variant protein of the present invention and the wild-type protein or another variant form. This can generally be accomplished by, for example, selecting or designing detection agents that bind to the region of a protein that differs between the variant and wild-type protein, such as a region of a protein that contains one or more amino acid substitutions that is/are encoded by a non-synonymous cSNP of the present invention, or a region of a protein that follows a nonsense mutation-type SNP that creates a stop codon thereby leading to a shorter polypeptide, or a region of a protein that follows a read-through mutation-type SNP that destroys a stop codon thereby leading to a longer polypeptide in which a portion of the polypeptide is present in one version of the polypeptide but not the other.

[0320] In another specific aspect of the invention, the variant proteins of the present invention are used as targets for diagnosing stenosis or for determining predisposition to stenosis in a human. Accordingly, the invention provides methods for detecting the presence of, or levels of, one or more variant proteins of the present invention in a cell, tissue, or organism. Such methods typically involve contacting a test sample with an agent (e.g., an antibody, small molecule compound, or peptide) capable of interacting with the variant protein such that specific binding of the agent to the variant protein can be detected. Such an assay can be provided in a single detection format or a multi-detection format such as an array, for example, an antibody or aptamer array (arrays for protein detection may also be referred to as “protein chips”). The variant protein of interest can be isolated from a test sample and assayed for the presence of a variant amino acid sequence encoded by one or more SNPs disclosed by the present invention. The SNPs may cause changes to the protein and the corresponding protein function/activity, such as through non-synonymous substitutions in protein coding regions that can lead to amino acid substitutions, deletions, insertions, and/or rearrangements; formation or destruction of stop codons; or alteration of control elements such as promoters. SNPs may also cause inappropriate post-translational modifications.

[0321] One preferred agent for detecting a variant protein in a sample is an antibody capable of selectively binding to a variant form of the protein (antibodies are described in greater detail in the next section). Such samples include, for example, tissues, cells, and biological fluids isolated from a subject, as well as tissues, cells and fluids present within a subject.

[0322] In vitro methods for detection of the variant proteins associated with stenosis that are disclosed herein and fragments thereof include, but are not limited to, enzyme linked immunosorbent assays (ELISAs), radioimmunoassays (RIA), Western blots, immunoprecipitations, immunofluorescence, and protein arrays/chips (e.g., arrays of antibodies or aptamers). For further information regarding immunoassays and related protein detection methods, see Current Protocols in Immunology, John Wiley & Sons, N.Y., and Hage, “Immunoassays”, Anal Chem. 1999 Jun. 15;71(12):294R-304R.

[0323] Additional analytic methods of detecting amino acid variants include, but are not limited to, altered electrophoretic mobility, altered tryptic peptide digest, altered protein activity in cell-based or cell-free assay, alteration in ligand or antibody-binding pattern, altered isoelectric point, and direct amino acid sequencing.

[0324] Alternatively, variant proteins can be detected in vivo in a subject by introducing into the subject a labeled antibody (or other type of detection reagent) specific for a variant protein. For example, the antibody can be labeled with a radioactive marker whose presence and location in a subject can be detected by standard imaging techniques.

[0325] Other uses of the variant peptides of the present invention are based on the class or action of the protein. For example, proteins isolated from humans and their mammalian orthologs serve as targets for identifying agents (e.g., small molecule drugs or antibodies) for use in therapeutic applications, particularly for modulating a biological or pathological response in a cell or tissue that expresses the protein. Pharmaceutical agents can be developed that modulate protein activity.

[0326] As an alternative to modulating gene expression, therapeutic compounds can be developed that modulate protein function. For example, many SNPs disclosed herein affect the amino acid sequence of the encoded protein (e.g., non-synonymous cSNPs and nonsense mutation-type SNPs). Such alterations in the encoded amino acid sequence may affect protein function, particularly if such amino acid sequence variations occur in functional protein domains, such as catalytic domains, ATP-binding domains, or ligand/substrate binding domains. It is well established in the art that variant proteins having amino acid sequence variations in functional domains can cause or influence pathological conditions. In such instances, compounds (e.g., small molecule drugs or antibodies) can be developed that target the variant protein and modulate (e.g., up- or down-regulate) protein function/activity.

[0327] The therapeutic methods of the present invention further include methods that target one or more variant proteins of the present invention. Variant proteins can be targeted using, for example, small molecule compounds, antibodies, aptamers, ligands/substrates, other proteins, or other protein-binding agents. Additionally, the skilled artisan will recognize that the novel protein variants (and polymorphic nucleic acid molecules) disclosed in Table 1 may themselves be directly used as therapeutic agents by acting as competitive inhibitors of corresponding art-known proteins (or nucleic acid molecules such as mRNA molecules).

[0328] The variant proteins of the present invention are particularly useful in drug screening assays, in cell-based or cell-free systems. Cell-based systems can utilize cells that naturally express the protein, a biopsy specimen, or cell cultures. In one embodiment, cell-based assays involve recombinant host cells expressing the variant protein. Cell-free assays can be used to detect the ability of a compound to directly bind to a variant protein or to the corresponding SNP-containing nucleic acid fragment that encodes the variant protein.

[0329] A variant protein of the present invention, as well as appropriate fragments thereof, can be used in high-throughput screening assays to test candidate compounds for the ability to bind and/or modulate the activity of the variant protein. These candidate compounds can be further screened against a protein having normal function (e.g., a wild-type/non-variant protein) to further determine the effect of the compound on the protein activity. Furthermore, these compounds can be tested in animal or invertebrate systems to determine in vivo activity/effectiveness. Compounds can be identified that activate (agonists) or inactivate (antagonists) the variant protein, and different compounds can be identified that cause various degrees of activation or inactivation of the variant protein.

[0330] Further, the variant proteins can be used to screen a compound for the ability to stimulate or inhibit interaction between the variant protein and a target molecule that normally interacts with the protein. The target can be a ligand, a substrate or a binding partner that the protein normally interacts with (for example, epinephrine or norepinephrine). Such assays typically include the steps of combining the variant protein with a candidate compound under conditions that allow the variant protein, or fragment thereof, to interact with the target molecule, and to detect the formation of a complex between the protein and the target or to detect the biochemical consequence of the interaction with the variant protein and the target, such as any of the associated effects of signal transduction.

[0331] Candidate compounds include, for example, 1) peptides such as soluble peptides, including Ig-tailed fusion peptides and members of random peptide libraries (see, e.g., Lam et al., Nature 354:82-84 (1991); Houghten et al., Nature 354:84-86 (1991)) and combinatorial chemistry-derived molecular libraries made of D- and/or L-configuration amino acids; 2) phosphopeptides (e.g., members of random and partially degenerate, directed phosphopeptide libraries, see, e.g., Songyang et al., Cell 72:767-778 (1993)); 3) antibodies (e.g., polyclonal, monoclonal, humanized, anti-idiotypic, chimeric, and single chain antibodies as well as Fab, F(ab′)₂, Fab expression library fragments, and epitope-binding fragments of antibodies); and 4) small organic and inorganic molecules (e.g., molecules obtained from combinatorial and natural product libraries).

[0332] One candidate compound is a soluble fragment of the variant protein that competes for ligand binding. Other candidate compounds include mutant proteins or appropriate fragments containing mutations that affect variant protein function and thus compete for ligand. Accordingly, a fragment that competes for ligand, for example with a higher affinity, or a fragment that binds ligand but does not allow release, is encompassed by the invention.

[0333] The invention further includes other end point assays to identify compounds that modulate (stimulate or inhibit) variant protein activity. The assays typically involve an assay of events in the signal transduction pathway that indicate protein activity. Thus, the expression of genes that are up or down-regulated in response to the variant protein dependent signal cascade can be assayed. In one embodiment, the regulatory region of such genes can be operably linked to a marker that is easily detectable, such as luciferase. Alternatively, phosphorylation of the variant protein, or a variant protein target, could also be measured. Any of the biological or biochemical functions mediated by the variant protein can be used as an endpoint assay. These include all of the biochemical or biological events described herein, in the references cited herein, incorporated by reference for these endpoint assay targets, and other functions known to those of ordinary skill in the art.

[0334] Binding and/or activating compounds can also be screened by using chimeric variant proteins in which an amino terminal extracellular domain or parts thereof, an entire transmembrane domain or subregions, and/or the carboxyl terminal intracellular domain or parts thereof, can be replaced by heterologous domains or subregions. For example, a substrate-binding region can be used that interacts with a different substrate than that which is normally recognized by a variant protein. Accordingly, a different set of signal transduction components is available as an end-point assay for activation. This allows for assays to be performed in other than the specific host cell from which the variant protein is derived.

[0335] The variant proteins are also useful in competition binding assays in methods designed to discover compounds that interact with the variant protein. Thus, a compound can be exposed to a variant protein under conditions that allow the compound to bind or to otherwise interact with the variant protein. A binding partner, such as ligand, that normally interacts with the variant protein is also added to the mixture. If the test compound interacts with the variant protein or its binding partner, it decreases the amount of complex formed or activity from the variant protein. This type of assay is particularly useful in screening for compounds that interact with specific regions of the variant protein (Hodgson, Bio/technology, 1992, Sept 10(9), 973-80).

[0336] To perform cell-free drug screening assays, it is sometimes desirable to immobilize either the variant protein or a fragment thereof, or its target molecule, to facilitate separation of complexes from uncomplexed forms of one or both of the proteins, as well as to accommodate automation of the assay. Any method for immobilizing proteins on matrices can be used in drug screening assays. In one embodiment, a fusion protein containing an added domain allows the protein to be bound to a matrix. For example, glutathione-S-transferase/¹²⁵I fusion proteins can be adsorbed onto glutathione sepharose beads (Sigma Chemical, St. Louis, Mo.) or glutathione derivatized microtitre plates, which are then combined with the cell lysates (e.g., ³⁵S-labeled) and a candidate compound, such as a drug candidate, and the mixture incubated under conditions conducive to complex formation (e.g., at physiological conditions for salt and pH). Following incubation, the beads can be washed to remove any unbound label, and the matrix immobilized and radiolabel determined directly, or in the supernatant after the complexes are dissociated. Alternatively, the complexes can be dissociated from the matrix, separated by SDS-PAGE, and the level of bound material found in the bead fraction quantitated from the gel using standard electrophoretic techniques.

[0337] Either the variant protein or its target molecule can be immobilized utilizing conjugation of biotin and streptavidin. Alternatively, antibodies reactive with the variant protein but which do not interfere with binding of the variant protein to its target molecule can be derivatized to the wells of the plate, and the variant protein trapped in the wells by antibody conjugation. Preparations of the target molecule and a candidate compound are incubated in the variant protein-presenting wells and the amount of complex trapped in the well can be quantitated. Methods for detecting such complexes, in addition to those described above for the GST-immobilized complexes, include immunodetection of complexes using antibodies reactive with the protein target molecule, or which are reactive with variant protein and compete with the target molecule, and enzyme-linked assays that rely on detecting an enzymatic activity associated with the target molecule.

[0338] Modulators of variant protein activity identified according to these drug screening assays can be used to treat a subject with a disorder mediated by the protein pathway, such as stenosis. These methods of treatment typically include the steps of administering the modulators of protein activity in a pharmaceutical composition to a subject in need of such treatment.

[0339] The variant proteins, or fragments thereof, disclosed herein can themselves be directly used to treat a disorder characterized by an absence of, inappropriate, or unwanted expression or activity of the variant protein. Accordingly, methods for treatment include the use of a variant protein disclosed herein or fragments thereof. In yet another aspect of the invention, variant proteins can be used as “bait proteins” in a two-hybrid assay or three-hybrid assay (see, e.g., U.S. Pat. No. 5,283,317; Zervos et al. (1993) Cell 72:223-232; Madura et al. (1993) J. Biol. Chem. 268:12046-12054; Bartel et al. (1993) Biotechniques 14:920-924; Iwabuchi et al. (1993) Oncogene 8:1693-1696; and Brent WO94/10300) to identify other proteins that bind to or interact with the variant protein and are involved in variant protein activity. Such variant protein-binding proteins are also likely to be involved in the propagation of signals by the variant proteins or variant protein targets as, for example, elements of a protein-mediated signaling pathway. Alternatively, such variant protein-binding proteins are inhibitors of the variant protein.

[0340] The two-hybrid system is based on the modular nature of most transcription factors, which typically consist of separable DNA-binding and activation domains.

[0341] Briefly, the assay typically utilizes two different DNA constructs. In one construct, the gene that codes for a variant protein is fused to a gene encoding the DNA binding domain of a known transcription factor (e.g., GAL-4). In the other construct, a DNA sequence, from a library of DNA sequences, that encodes an unidentified protein (“prey” or “sample”) is fused to a gene that codes for the activation domain of the known transcription factor. If the “bait” and the “prey” proteins are able to interact, in vivo, forming a variant protein-dependent complex, the DNA-binding and activation domains of the transcription factor are brought into close proximity. This proximity allows transcription of a reporter gene (e.g., LacZ) that is operably linked to a transcriptional regulatory site responsive to the transcription factor. Expression of the reporter gene can be detected, and cell colonies containing the functional transcription factor can be isolated and used to obtain the cloned gene that encodes the protein that interacts with the variant protein.

[0342] Antibodies Directed to Variant Proteins

[0343] The present invention also provides antibodies that selectively bind to the variant proteins disclosed herein and fragments thereof. Such antibodies may be used to quantitatively or qualitatively detect the variant proteins of the present invention. As used herein, an antibody selectively binds a target variant protein when it binds the variant protein and does not significantly bind to non-variant proteins, i.e., the antibody does not significantly bind to normal, wild-type, or art-known proteins that do not contain a variant amino acid sequence due to one or more SNPs of the present invention (variant amino acid sequences may be due to, for example, nonsynonymous cSNPs, nonsense SNPs that create a stop codon, thereby causing a truncation of a polypeptide or SNPs that cause read-through mutations resulting in an extension of a polypeptide).

[0344] As used herein, an antibody is defined in terms consistent with that recognized in the art: they are multi-subunit proteins produced by an organism in response to an antigen challenge. The antibodies of the present invention include both monoclonal antibodies and polyclonal antibodies, as well as antigen-reactive proteolytic fragments of such antibodies, such as Fab, F(ab)′₂, and Fv fragments. In addition, an antibody of the present invention further includes any of a variety of engineered antigen-binding molecules such as a chimeric antibody (U.S. Pat. Nos. 4,816,567 and 4,816,397; Morrison et al., Proc. Natl. Acad. Sci. USA, 81:6851, 1984; Neuberger et al., Nature 312:604, 1984), a humanized antibody (U.S. Pat. Nos. 5,693,762; 5,585,089; and 5,565,332), a single-chain Fv (U.S. Pat. No. 4,946,778; Ward et al., Nature 334:544, 1989), a bispecific antibody with two binding specificities (Segal et al., J. Immunol. Methods 248:1, 2001; Carter, J. Immunol. Methods 248:7, 2001), a diabody, a triabody, and a tetrabody (Todorovska et al., J. Immunol. Methods, 248:47, 2001), as well as a Fab conjugate (dimer or trimer), and a minibody.

[0345] Many methods are known in the art for generating and/or identifying antibodies to a given target antigen (Harlow, Antibodies, Cold Spring Harbor Press, (1989)). In general, an isolated peptide (e.g., a variant protein of the present invention) is used as an immunogen and is administered to a mammalian organism, such as a rat, rabbit, hamster or mouse. Either a full-length protein, an antigenic peptide fragment (e.g., a peptide fragment containing a region that varies between a variant protein and a corresponding wild-type protein), or a fusion protein can be used. A protein used as an immunogen may be naturally-occurring, synthetic or recombinantly produced, and may be administered in combination with an adjuvant, including but not limited to, Freund's (complete and incomplete), mineral gels such as aluminum hydroxide, surface active substance such as lysolecithin, pluronic polyols, polyanions, peptides, oil emulsions, keyhole limpet hemocyanin, dinitrophenol, and the like.

[0346] Monoclonal antibodies can be produced by hybridoma technology (Kohler and Milstein, Nature, 256:495, 1975), which immortalizes cells secreting a specific monoclonal antibody. The immortalized cell lines can be created in vitro by fusing two different cell types, typically lymphocytes, and tumor cells. The hybridoma cells may be cultivated in vitro or in vivo. Additionally, fully human antibodies can be generated by transgenic animals (He et al., J. Immunol., 169:595, 2002). Fd phage and Fd phagemid technologies may be used to generate and select recombinant antibodies in vitro (Hoogenboom and Chames, Immunol. Today 21:371, 2000; Liu et al., J. Mol. Biol. 315:1063, 2002). The complementarity-determining regions of an antibody can be identified, and synthetic peptides corresponding to such regions may be used to mediate antigen binding (U.S. Pat. No. 5,637,677).

[0347] Antibodies are preferably prepared against regions or discrete fragments of a variant protein containing a variant amino acid sequence as compared to the corresponding wild-type protein (e.g., a region of a variant protein that includes an amino acid encoded by a nonsynonymous cSNP, a region affected by truncation caused by a nonsense SNP that creates a stop codon, or a region resulting from the destruction of a stop codon due to read-through mutation caused by a SNP). Furthermore, preferred regions will include those involved in function/activity and/or protein/binding partner interaction. Such fragments can be selected on a physical property, such as fragments corresponding to regions that are located on the surface of the protein, e.g., hydrophilic regions, or can be selected based on sequence uniqueness, or based on the position of the variant amino acid residue(s) encoded by the SNPs provided by the present invention. An antigenic fragment will typically comprise at least about 8-10 contiguous amino acid residues in which at least one of the amino acid residues is an amino acid affected by a SNP disclosed herein. The antigenic peptide can comprise, however, at least 12, 14, 16, 20, 25, 50, 100 (or any other number in-between) or more amino acid residues, provided that at least one amino acid is affected by a SNP disclosed herein.

[0348] Detection of an antibody of the present invention can be facilitated by coupling (i.e., physically linking) the antibody or an antigen-reactive fragment thereof to a detectable substance. Detectable substances include, but are not limited to, various enzymes, prosthetic groups, fluorescent materials, luminescent materials, bioluminescent materials, and radioactive materials. Examples of suitable enzymes include horseradish peroxidase, alkaline phosphatase, β-galactosidase, or acetylcholinesterase; examples of suitable prosthetic group complexes include streptavidin/biotin and avidin/biotin; examples of suitable fluorescent materials include umbelliferone, fluorescein, fluorescein isothiocyanate, rhodamine, dichlorotriazinylamine fluorescein, dansyl chloride or phycoerythrin; an example of a luminescent material includes luminol; examples of bioluminescent materials include luciferase, luciferin, and aequorin, and examples of suitable radioactive material include ¹²⁵I, ¹³¹I, ³⁵S or ³H.

[0349] Antibodies, particularly the use of antibodies as therapeutic agents, are reviewed in: Morgan, “Antibody therapy for Alzheimer's disease”, Expert Rev Vaccines. 2003 February; 2(1):53-9; Ross et al., “Anticancer antibodies”, Am J Clin Pathol. 2003 April; 119(4):472-85; Goldenberg, “Advancing role of radiolabeled antibodies in the therapy of cancer”, Cancer Immunol Immunother. 2003 May; 52(5):281-96. Epub 2003 Mar 11; Ross et al., “Antibody-based therapeutics in oncology”, Expert Rev Anticancer Ther. 2003 February; 3(1):107-21; Cao et al., “Bispecific antibody conjugates in therapeutics”, Adv Drug Deliv Rev. 2003 Feb. 10;55(2):171-97; von Mehrenet al., “Monoclonal antibody therapy for cancer”, Annu Rev Med. 2003;54:343-69. Epub 2001 Dec. 3; Hudson et al., “Engineered antibodies”, Nat Med. 2003 January; 9(1): 129-34; Brekke et al., “Therapeutic antibodies for human diseases at the dawn of the twenty-first century”, Nat Rev Drug Discov. 2003 January; 2(1):52-62 (Erratum in: Nat Rev Drug Discov. 2003 March; 2(3):240); Houdebine, “Antibody manufacture in transgenic animals and comparisons with other systems”, Curr Opin Biotechnol. 2002 December; 13(6):625-9; Andreakos et al., “Monoclonal antibodies in 100, immune and inflammatory diseases”, Curr Opin Biotechnol. 2002 December; 13(6):615-20; Kellermann et al., “Antibody discovery: the use of transgenic mice to generate human monoclonal antibodies for therapeutics”, Curr Opin Biotechnol. 2002 December; 13(6):593-7; Pini et al., “Phage display and colony filter screening for high-throughput selection of antibody libraries”, Comb Chem High Throughput Screen. 2002 November; 5(7):503-10; Batra et al., “Pharmacokinetics and biodistribution of genetically engineered antibodies”, Curr Opin Biotechnol. 2002 December; 13(6):603-8; and Tangri et al., “Rationally engineered proteins or antibodies with absent or reduced immunogenicity”, Curr Med Chem. 2002 December; 9(24):2191-9.

[0350] Uses of Antibodies

[0351] Antibodies can be used to isolate the variant proteins of the present invention from a natural cell source or from recombinant host cells by standard techniques, such as affinity chromatography or immunoprecipitation. In addition, antibodies are useful for detecting the presence of a variant protein of the present invention in cells or tissues to determine the pattern of expression of the variant protein among various tissues in an organism and over the course of normal development or disease progression. Further, antibodies can be used to detect variant protein in situ, in vitro, in a bodily fluid, or in a cell lysate or supernatant in order to evaluate the amount and pattern of expression. Also, antibodies can be used to assess abnormal tissue distribution, abnormal expression during development, or expression in an abnormal condition, such as stenosis. Additionally, antibody detection of circulating fragments of the full-length variant protein can be used to identify turnover.

[0352] Antibodies to the variant proteins of the present invention are also useful in pharmacogenomic analysis. Thus, antibodies against variant proteins encoded by alternative SNP alleles can be used to identify individuals that require modified treatment modalities.

[0353] Further, antibodies can be used to assess expression of the variant protein in disease states such as in active stages of the disease or in an individual with a predisposition to a disease related to the protein's function, particularly stenosis. Antibodies specific for a variant protein encoded by a SNP-containing nucleic acid molecule of the present invention can be used to assay for the presence of the variant protein, such as to screen for predisposition to stenosis as indicated by the presence of the variant protein.

[0354] Antibodies are also useful as diagnostic tools for evaluating the variant proteins in conjunction with analysis by electrophoretic mobility, isoelectric point, tryptic peptide digest, and other physical assays well known in the art.

[0355] Antibodies are also useful for tissue typing. Thus, where a specific variant protein has been correlated with expression in a specific tissue, antibodies that are specific for this protein can be used to identify a tissue type.

[0356] Antibodies can also be used to assess aberrant subcellular localization of a variant protein in cells in various tissues. The diagnostic uses can be applied, not only in genetic testing, but also in monitoring a treatment modality. Accordingly, where treatment is ultimately aimed at correcting the expression level or the presence of variant protein or aberrant tissue distribution or developmental expression of a variant protein, antibodies directed against the variant protein or relevant fragments can be used to monitor therapeutic efficacy.

[0357] The antibodies are also useful for inhibiting variant protein function, for example, by blocking the binding of a variant protein to a binding partner. These uses can also be applied in a therapeutic context in which treatment involves inhibiting a variant protein's function. An antibody can be used, for example, to block or competitively inhibit binding, thus modulating (agonizing or antagonizing) the activity of a variant protein. Antibodies can be prepared against specific variant protein fragments containing sites required for function or against an intact variant protein that is associated with a cell or cell membrane. For in vivo administration, an antibody may be linked with an additional therapeutic payload such as a radionuclide, an enzyme, an immunogenic epitope, or a cytotoxic agent. Suitable cytotoxic agents include, but are not limited to, bacterial toxin such as diphtheria, and plant toxin such as ricin. The in vivo half-life of an antibody or a fragment thereof may be lengthened by pegylation through conjugation to polyethylene glycol (Leong et al., Cytokine 16:106, 2001).

[0358] The invention also encompasses kits for using antibodies, such as kits for detecting the presence of a variant protein in a test sample. An exemplary kit can comprise antibodies such as a labeled or labelable antibody and a compound or agent for detecting variant proteins in a biological sample; means for determining the amount, or presence/absence of variant protein in the sample; means for comparing the amount of variant protein in the sample with a standard; and instructions for use.

[0359] Vectors and Host Cells

[0360] The present invention also provides vectors containing the SNP-containing nucleic acid molecules described herein. The term “vector” refers to a vehicle, preferably a nucleic acid molecule, which can transport a SNP-containing nucleic acid molecule. When the vector is a nucleic acid molecule, the SNP-containing nucleic acid molecule can be covalently linked to the vector nucleic acid. Such vectors include, but are not limited to, a plasmid, single or double stranded phage, a single or double stranded RNA or DNA viral vector, or artificial chromosome, such as a BAC, PAC, YAC, or MAC.

[0361] A vector can be maintained in a host cell as an extrachromosomal element where it replicates and produces additional copies of the SNP-containing nucleic acid molecules. Alternatively, the vector may integrate into the host cell genome and produce additional copies of the SNP-containing nucleic acid molecules when the host cell replicates.

[0362] The invention provides vectors for the maintenance (cloning vectors) or vectors for expression (expression vectors) of the SNP-containing nucleic acid molecules. The vectors can function in prokaryotic or eukaryotic cells or in both (shuttle vectors).

[0363] Expression vectors typically contain cis-acting regulatory regions that are operably linked in the vector to the SNP-containing nucleic acid molecules such that transcription of the SNP-containing nucleic acid molecules is allowed in a host cell. The SNP-containing nucleic acid molecules can also be introduced into the host cell with a separate nucleic acid molecule capable of affecting transcription. Thus, the second nucleic acid molecule may provide a trans-acting factor interacting with the cis-regulatory control region to allow transcription of the SNP-containing nucleic acid molecules from the vector. Alternatively, a trans-acting factor may be supplied by the host cell. Finally, a trans-acting factor can be produced from the vector itself. It is understood, however, that in some embodiments, transcription and/or translation of the nucleic acid molecules can occur in a cell-free system.

[0364] The regulatory sequences to which the SNP-containing nucleic acid molecules described herein can be operably linked include promoters for directing mRNA transcription. These include, but are not limited to, the left promoter from bacteriophage λ, the lac, TRP, and TAC promoters from E. coli, the early and late promoters from SV40, the CMV immediate early promoter, the adenovirus early and late promoters, and retrovirus long-terminal repeats.

[0365] In addition to control regions that promote transcription, expression vectors may also include regions that modulate transcription, such as repressor binding sites and enhancers. Examples include the SV40 enhancer, the cytomegalovirus immediate early enhancer, polyoma enhancer, adenovirus enhancers, and retrovirus LTR enhancers.

[0366] In addition to containing sites for transcription initiation and control, expression vectors can also contain sequences necessary for transcription termination and, in the transcribed region, a ribosome-binding site for translation. Other regulatory control elements for expression include initiation and termination codons as well as polyadenylation signals. A person of ordinary skill in the art would be aware of the numerous regulatory sequences that are useful in expression vectors (see, e.g., Sambrook and Russell, 2000, Molecular Cloning: A Laboratory Manual, Cold Spring Harbor Laboratory Press, Cold Spring Harbor, N.Y.).

[0367] A variety of expression vectors can be used to express a SNP-containing nucleic acid molecule. Such vectors include chromosomal, episomal, and virus-derived vectors, for example, vectors derived from bacterial plasmids, from bacteriophage, from yeast episomes, from yeast chromosomal elements, including yeast artificial chromosomes, from viruses such as baculoviruses, papovaviruses such as SV40, Vaccinia viruses, adenoviruses, poxviruses, pseudorabies viruses, and retroviruses. Vectors can also be derived from combinations of these sources such as those derived from plasmid and bacteriophage genetic elements, e.g., cosmids and phagemids. Appropriate cloning and expression vectors for prokaryotic and eukaryotic hosts are described in Sambrook and Russell, 2000, Molecular Cloning: A Laboratory Manual, Cold Spring Harbor Laboratory Press, Cold Spring Harbor, N.Y.

[0368] The regulatory sequence in a vector may provide constitutive expression in one or more host cells (e.g., tissue specific expression) or may provide for inducible expression in one or more cell types such as by temperature, nutrient additive, or exogenous factor, e.g., a hormone or other ligand. A variety of vectors that provide constitutive or inducible expression of a nucleic acid sequence in prokaryotic and eukaryotic host cells are well known to those of ordinary skill in the art.

[0369] A SNP-containing nucleic acid molecule can be inserted into the vector by methodology well-known in the art. Generally, the SNP-containing nucleic acid molecule that will ultimately be expressed is joined to an expression vector by cleaving the SNP-containing nucleic acid molecule and the expression vector with one or more restriction enzymes and then ligating the fragments together. Procedures for restriction enzyme digestion and ligation are well known to those of ordinary skill in the art.

[0370] The vector containing the appropriate nucleic acid molecule can be introduced into an appropriate host cell for propagation or expression using well-known techniques.

[0371] Bacterial host cells include, but are not limited to, E. coli, Streptomyces, and Salmonella typhimurium. Eukaryotic host cells include, but are not limited to, yeast, insect cells such as Drosophila, animal cells such as COS and CHO cells, and plant cells.

[0372] As described herein, it may be desirable to express the variant peptide as a fusion protein. Accordingly, the invention provides fusion vectors that allow for the production of the variant peptides. Fusion vectors can, for example, increase the expression of a recombinant protein, increase the solubility of the recombinant protein, and aid in the purification of the protein by acting, for example, as a ligand for affinity purification. A proteolytic cleavage site may be introduced at the junction of the fusion moiety so that the desired variant peptide can ultimately be separated from the fusion moiety. Proteolytic enzymes suitable for such use include, but are not limited to, factor Xa, thrombin, and enterokinase. Typical fusion expression vectors include pGEX (Smith et al., Gene 67:31-40 (1988)), pMAL (New England Biolabs, Beverly, Mass.) and pRIT5 (Pharmacia, Piscataway, N.J.) which fuse glutathione S-transferase (GST), maltose E binding protein, or protein A, respectively, to the target recombinant protein. Examples of suitable inducible non-fusion E. coli expression vectors include pTrc (Amann et al., Gene 69:301-315 (1988)) and pET 11d (Studier et al., Gene Expression Technology: Methods in Enzymology 185:60-89 (1990)).

[0373] Recombinant protein expression can be maximized in a bacterial host by providing a genetic background wherein the host cell has an impaired capacity to proteolytically cleave the recombinant protein (Gottesman, S., Gene Expression Technology: Methods in Enzymology 185, Academic Press, San Diego, Calif. (1990)119-128). Alternatively, the sequence of the SNP-containing nucleic acid molecule of interest can be altered to provide preferential codon usage for a specific host cell, for example, E. coli (Wada et al., Nucleic Acids Res. 20:2111-2118 (1992)).

[0374] The SNP-containing nucleic acid molecules can also be expressed by expression vectors that are operative in yeast. Examples of vectors for expression in yeast (e.g., S. cerevisiae) include pYepSec1 (Baldari, et al., EMBO J. 6:229-234 (1987)), pMFa (Kujan et al., Cell 30:933-943(1982)), pJRY88 (Schultz et al., Gene 54:113-123 (1987)), and pYES2 (Invitrogen Corporation, San Diego, Calif.).

[0375] The SNP-containing nucleic acid molecules can also be expressed in insect cells using, for example, baculovirus expression vectors. Baculovirus vectors available for expression of proteins in cultured insect cells (e.g., Sf9 cells) include the pAc series (Smith et al., Mol. Cell Biol. 3:2156-2165 (1983)) and the pVL series (Lucklow et al., Virology 170:31-39 (1989)).

[0376] In certain embodiments of the invention, the SNP-containing nucleic acid molecules described herein are expressed in mammalian cells using mammalian expression vectors. Examples of mammalian expression vectors include pCDM8 (Seed, B. Nature 329:840(1987)) and pMT2PC (Kaufman et al., EMBO J. 6:187-195 (1987)).

[0377] The invention also encompasses vectors in which the SNP-containing nucleic acid molecules described herein are cloned into the vector in reverse orientation, but operably linked to a regulatory sequence that permits transcription of antisense RNA. Thus, an antisense transcript can be produced to the SNP-containing nucleic acid sequences described herein, including both coding and non-coding regions. Expression of this antisense RNA is subject to each of the parameters described above in relation to expression of the sense RNA (regulatory sequences, constitutive or inducible expression, tissue-specific expression).

[0378] The invention also relates to recombinant host cells containing the vectors described herein. Host cells therefore include, for example, prokaryotic cells, lower eukaryotic cells such as yeast, other eukaryotic cells such as insect cells, and higher eukaryotic cells such as mammalian cells.

[0379] The recombinant host cells can be prepared by introducing the vector constructs described herein into the cells by techniques readily available to persons of ordinary skill in the art. These include, but are not limited to, calcium phosphate transfection, DEAE-dextran-mediated transfection, cationic lipid-mediated transfection, electroporation, transduction, infection, lipofection, and other techniques such as those described in Sambrook and Russell, 2000, Molecular Cloning: A Laboratory Manual, Cold Spring Harbor Laboratory, Cold Spring Harbor Laboratory Press, Cold Spring Harbor, N.Y.).

[0380] Host cells can contain more than one vector. Thus, different SNP-containing nucleotide sequences can be introduced in different vectors into the same cell. Similarly, the SNP-containing nucleic acid molecules can be introduced either alone or with other nucleic acid molecules that are not related to the SNP-containing nucleic acid molecules, such as those providing trans-acting factors for expression vectors. When more than one vector is introduced into a cell, the vectors can be introduced independently, co-introduced, or joined to the nucleic acid molecule vector.

[0381] In the case of bacteriophage and viral vectors, these can be introduced into cells as packaged or encapsulated virus by standard procedures for infection and transduction. Viral vectors can be replication-competent or replication-defective. In the case in which viral replication is defective, replication can occur in host cells that provide functions that complement the defects.

[0382] Vectors generally include selectable markers that enable the selection of the subpopulation of cells that contain the recombinant vector constructs. The marker can be inserted in the same vector that contains the SNP-containing nucleic acid molecules described herein or may be in a separate vector. Markers include, for example, tetracycline or ampicillin-resistance genes for prokaryotic host cells, and dihydrofolate reductase or neomycin resistance genes for eukaryotic host cells. However, any marker that provides selection for a phenotypic trait can be effective.

[0383] While the mature variant proteins can be produced in bacteria, yeast, mammalian cells, and other cells under the control of the appropriate regulatory sequences, cell-free transcription and translation systems can also be used to produce these variant proteins using RNA derived from the DNA constructs described herein.

[0384] Where secretion of the variant protein is desired, which is difficult to achieve with multi-transmembrane domain containing proteins such as G-protein-coupled receptors (GPCRs), appropriate secretion signals can be incorporated into the vector. The signal sequence can be endogenous to the peptides or heterologous to these peptides.

[0385] Where the variant protein is not secreted into the medium, the protein can be isolated from the host cell by standard disruption procedures, including freeze/thaw, sonication, mechanical disruption, use of lysing agents, and the like. The variant protein can then be recovered and purified by well-known purification methods including, for example, ammonium sulfate precipitation, acid extraction, anion or cationic exchange chromatography, phosphocellulose chromatography, hydrophobic-interaction chromatography, affinity chromatography, hydroxylapatite chromatography, lectin chromatography, or high performance liquid chromatography.

[0386] It is also understood that, depending upon the host cell in which recombinant production of the variant proteins described herein occurs, they can have various glycosylation patterns, or may be non-glycosylated, as when produced in bacteria. In addition, the variant proteins may include an initial modified methionine in some cases as a result of a host-mediated process.

[0387] For further information regarding vectors and host cells, see Current Protocols in Molecular Biology, John Wiley & Sons, N.Y.

[0388] Uses of Vectors and Host Cells, and Transgenic Animals

[0389] Recombinant host cells that express the variant proteins described herein have a variety of uses. For example, the cells are useful for producing a variant protein that can be further purified into a preparation of desired amounts of the variant protein or fragments thereof. Thus, host cells containing expression vectors are useful for variant protein production.

[0390] Host cells are also useful for conducting cell-based assays involving the variant protein or variant protein fragments, such as those described above as well as other formats known in the art. Thus, a recombinant host cell expressing a variant protein is useful for assaying compounds that stimulate or inhibit variant protein function. Such an ability of a compound to modulate variant protein function may not be apparent from assays of the compound on the native/wild-type protein, or from cell-free assays of the compound. Recombinant host cells are also useful for assaying functional alterations in the variant proteins as compared with a known function.

[0391] Genetically-engineered host cells can be further used to produce non-human transgenic animals. A transgenic animal is preferably a non-human mammal, for example, a rodent, such as a rat or mouse, in which one or more of the cells of the animal include a transgene. A transgene is exogenous DNA containing a SNP of the present invention which is integrated into the genome of a cell from which a transgenic animal develops and which remains in the genome of the mature animal in one or more of its cell types or tissues. Such animals are useful for studying the function of a variant protein in vivo, and identifying and evaluating modulators of variant protein activity. Other examples of transgenic animals include, but are not limited to, non-human primates, sheep, dogs, cows, goats, chickens, and amphibians. Transgenic non-human mammals such as cows and goats can be used to produce variant proteins which can be secreted in the animal's milk and then recovered.

[0392] A transgenic animal can be produced by introducing a SNP-containing nucleic acid molecule into the male pronuclei of a fertilized oocyte, e.g., by microinjection or retroviral infection, and allowing the oocyte to develop in a pseudopregnant female foster animal. Any nucleic acid molecules that contain one or more SNPs of the present invention can potentially be introduced as a transgene into the genome of a non-human animal.

[0393] Any of the regulatory or other sequences useful in expression vectors can form part of the transgenic sequence. This includes intronic sequences and polyadenylation signals, if not already included. A tissue-specific regulatory sequence(s) can be operably linked to the transgene to direct expression of the variant protein in particular cells or tissues.

[0394] Methods for generating transgenic animals via embryo manipulation and microinjection, particularly animals such as mice, have become conventional in the art and are described in, for example, U.S. Pat. Nos. 4,736,866 and 4,870,009, both by Leder et al., U.S. Pat. No. 4,873,191 by Wagner et al., and in Hogan, B., Manipulating the Mouse Embryo, (Cold Spring Harbor Laboratory Press, Cold Spring Harbor, N.Y., 1986). Similar methods are used for production of other transgenic animals. A transgenic founder animal can be identified based upon the presence of the transgene in its genome and/or expression of transgenic mRNA in tissues or cells of the animals. A transgenic founder animal can then be used to breed additional animals carrying the transgene. Moreover, transgenic animals carrying a transgene can further be bred to other transgenic animals carrying other transgenes. A transgenic animal also includes a non-human animal in which the entire animal or tissues in the animal have been produced using the homologously recombinant host cells described herein. In another embodiment, transgenic non-human animals can be produced which contain selected systems that allow for regulated expression of the transgene. One example of such a system is the cre/loxP recombinase system of bacteriophage P1 (Lakso et al. PNAS 89:6232-6236 (1992)). Another example of a recombinase system is the FLP recombinase system of S. cerevisiae (O'Gorman et al. Science 251:1351-1355 (1991)). If a cre/loxP recombinase system is used to regulate expression of the transgene, animals containing transgenes encoding both the Cre recombinase and a selected protein are generally needed. Such animals can be provided through the construction of “double” transgenic animals, e.g., by mating two transgenic animals, one containing a transgene encoding a selected variant protein and the other containing a transgene encoding a recombinase.

[0395] Clones of the non-human transgenic animals described herein can also be produced according to the methods described in, for example, Wilmut, I. et al. Nature 385:810-813 (1997) and PCT International Publication Nos. WO 97/07668 and WO 97/07669. In brief, a cell (e.g., a somatic cell) from the transgenic animal can be isolated and induced to exit the growth cycle and enter G₀ phase. The quiescent cell can then be fused, e.g., through the use of electrical pulses, to an enucleated oocyte from an animal of the same species from which the quiescent cell is isolated. The reconstructed oocyte is then cultured such that it develops to morula or blastocyst and then transferred to pseudopregnant female foster animal. The offspring born of this female foster animal will be a clone of the animal from which the cell (e.g., a somatic cell) is isolated.

[0396] Transgenic animals containing recombinant cells that express the variant proteins described herein are useful for conducting the assays described herein in an in vivo context. Accordingly, the various physiological factors that are present in vivo and that could influence ligand or substrate binding, variant protein activation, signal transduction, or other processes or interactions, may not be evident from in vitro cell-free or cell-based assays. Thus, non-human transgenic animals of the present invention may be used to assay in vivo variant protein function as well as the activities of a therapeutic agent or compound that modulates variant protein function/activity or expression. Such animals are also suitable for assessing the effects of null mutations (i.e., mutations that substantially or completely eliminate one or more variant protein functions).

[0397] For further information regarding transgenic animals, see Houdebine, “Antibody manufacture in transgenic animals and comparisons with other systems”, Curr Opin Biotechnol. 2002 December; 13(6):625-9; Petters et al., “Transgenic animals as models for human disease”, Transgenic Res. 2000;9(4-5):347-51; discussion 345-6; Wolf et al., “Use of transgenic animals in understanding molecular mechanisms of toxicity”, J Pharm Pharmacol. 1998 June; 50(6):567-74; Echelard, “Recombinant protein production in transgenic animals”, Curr Opin Biotechnol. 1996 October; 7(5):536-40; Houdebine, “Transgenic animal bioreactors”, Transgenic Res. 2000;9(4-5):305-20; Pirity et al., “Embryonic stem cells, creating transgenic animals”, Methods Cell Biol. 1998;57:279-93; and Robl et al., “Artificial chromosome vectors and expression of complex proteins in transgenic animals”, Theriogenology. 2003 Jan. 1;59(1):107-13.

[0398] Computer-Related Embodiments

[0399] The SNPs provided in the present invention may be “provided” in a variety of mediums to facilitate use thereof. As used in this section, “provided” refers to a manufacture, other than an isolated nucleic acid molecule, that contains SNP information of the present invention. Such a manufacture provides the SNP information in a form that allows a skilled artisan to examine the manufacture using means not directly applicable to examining the SNPs or a subset thereof as they exist in nature or in purified form. The SNP information that may be provided in such a form includes any of the SNP information provided by the present invention such as, for example, polymorphic nucleic acid and/or amino acid sequence information such as SEQ ID NOS:1-284, SEQ ID NOS:285-568, SEQ ID NOS:5608-5780, SEQ ID NOS:569-5607, and SEQ ID NOS:5781-26,130; information about observed SNP alleles, alternative codons, populations, allele frequencies, SNP types, and/or affected proteins; or any other information provided by the present invention in Tables 1-2 and/or the Sequence Listing.

[0400] In one application of this embodiment, the SNPs of the present invention can be recorded on a computer readable medium. As used herein, “computer readable medium” refers to any medium that can be read and accessed directly by a computer. Such media include, but are not limited to: magnetic storage media, such as floppy discs, hard disc storage medium, and magnetic tape; optical storage media such as CD-ROM; electrical storage media such as RAM and ROM; and hybrids of these categories such as magnetic/optical storage media. A skilled artisan can readily appreciate how any of the presently known computer readable media can be used to create a manufacture comprising computer readable medium having recorded thereon a nucleotide sequence of the present invention. One such medium is provided with the present application, namely, the present application contains computer readable medium (CD-R) that has nucleic acid sequences (and encoded protein sequences) containing SNPs provided/recorded thereon in ASCII text format in a Sequence Listing along with accompanying Tables that contain detailed SNP and sequence information (transcript sequences are provided as SEQ ID NOS:11-284, protein sequences are provided as SEQ ID NOS:285-568, genomic sequences are provided as SEQ ID NOS:5608-5780, transcript-based context sequences are provided as SEQ ID NOS:569-5607, and genomic-based context sequences are provided as SEQ ID NOS:5781-26,130).

[0401] As used herein, “recorded” refers to a process for storing information on computer readable medium. A skilled artisan can readily adopt any of the presently known methods for recording information on computer readable medium to generate manufactures comprising the SNP information of the present invention.

[0402] A variety of data storage structures are available to a skilled artisan for creating a computer readable medium having recorded thereon a nucleotide or amino acid sequence of the present invention. The choice of the data storage structure will generally be based on the means chosen to access the stored information. In addition, a variety of data processor programs and formats can be used to store the nucleotide/amino acid sequence information of the present invention on computer readable medium. For example, the sequence information can be represented in a word processing text file, formatted in commercially-available software such as WordPerfect and Microsoft Word, represented in the form of an ASCII file, or stored in a database application, such as OB2, Sybase, Oracle, or the like. A skilled artisan can readily adapt any number of data processor structuring formats (e.g., text file or database) in order to obtain computer readable medium having recorded thereon the SNP information of the present invention.

[0403] By providing the SNPs of the present invention in computer readable form, a skilled artisan can routinely access the SNP information for a variety of purposes. Computer software is publicly available which allows a skilled artisan to access sequence information provided in a computer readable medium. Examples of publicly available computer software include BLAST (Altschul et at, J. Mol. Biol. 215:403-410 (1990)) and BLAZE (Brutlag et at, Comp. Chem. 17:203-207 (1993)) search algorithms.

[0404] The present invention further provides systems, particularly computer-based systems, which contain the SNP information described herein. Such systems may be designed to store and/or analyze information on, for example, a large number of SNP positions, or information on SNP genotypes from a large number of individuals. The SNP information of the present invention represents a valuable information source. The SNP information of the present invention stored/analyzed in a computer-based system may be used for such computer-intensive applications as determining or analyzing SNP allele frequencies in a population, mapping disease genes, genotype-phenotype association studies, grouping SNPs into haplotypes, correlating SNP haplotypes with response to particular drugs, or for various other bioinformatic, pharmacogenomic, drug development, or human identification/forensic applications.

[0405] As used herein, “a computer-based system” refers to the hardware means, software means, and data storage means used to analyze the SNP information of the present invention. The minimum hardware means of the computer-based systems of the present invention typically comprises a central processing unit (CPU), input means, output means, and data storage means. A skilled artisan can readily appreciate that any one of the currently available computer-based systems are suitable for use in the present invention. Such a system can be changed into a system of the present invention by utilizing the SNP information provided on the CD-R, or a subset thereof, without any experimentation.

[0406] As stated above, the computer-based systems of the present invention comprise a data storage means having stored therein SNPs of the present invention and the necessary hardware means and software means for supporting and implementing a search means. As used herein, “data storage means” refers to memory which can store SNP information of the present invention, or a memory access means which can access manufactures having recorded thereon the SNP information of the present invention.

[0407] As used herein, “search means” refers to one or more programs or algorithms that are implemented on the computer-based system to identify or analyze SNPs in a target sequence based on the SNP information stored within the data storage means. Search means can be used to determine which nucleotide is present at a particular SNP position in the target sequence. As used herein, a “target sequence” can be any DNA sequence containing the SNP position(s) to be searched or queried.

[0408] As used herein, “a target structural motif,” or “target motif,” refers to any rationally selected sequence or combination of sequences containing a SNP position in which the sequence(s) is chosen based on a three-dimensional configuration that is formed upon the folding of the target motif. There are a variety of target motifs known in the art. Protein target motifs include, but are not limited to, enzymatic active sites and signal sequences. Nucleic acid target motifs include, but are not limited to, promoter sequences, hairpin structures, and inducible expression elements (protein binding sequences).

[0409] A variety of structural formats for the input and output means can be used to input and output the information in the computer-based systems of the present invention. An exemplary format for an output means is a display that depicts the presence or absence of specified nucleotides (alleles) at particular SNP positions of interest. Such presentation can provide a rapid, binary scoring system for many SNPs simultaneously.

[0410] One exemplary embodiment of a computer-based system comprising SNP information of the present invention is provided in FIG. 1. FIG. 1 provides a block diagram of a computer system 102 that can be used to implement the present invention. The computer system 102 includes a processor 106 connected to a bus 104. Also connected to the bus 104 are a main memory 108 (preferably implemented as random access memory, RAM) and a variety of secondary storage devices 110, such as a hard drive 112 and a removable medium storage device 114. The removable medium storage device 114 may represent, for example, a floppy disk drive, a CD-ROM drive, a magnetic tape drive, etc. A removable storage medium 116 (such as a floppy disk, a compact disk, a magnetic tape, etc.) containing control logic and/or data recorded therein may be inserted into the removable medium storage device 114. The computer system 102 includes appropriate software for reading the control logic and/or the data from the removable storage medium 116 once inserted in the removable medium storage device 114.

[0411] The SNP information of the present invention may be stored in a well-known manner in the main memory 108, any of the secondary storage devices 110, and/or a removable storage medium 116. Software for accessing and processing the SNP information (such as SNP scoring tools, search tools, comparing tools, etc.) preferably resides in main memory 108 during execution.

### EXAMPLES

### Statistical Analysis of SNP Association With Coronary Stenosis

[0412] A case-control genetic study to determine the association of SNPs in the human genome with coronary stenosis was carried out using genomic DNA extracted from 2 independently collected case-control sample sets. A sample set from the University of California, San Francisco (UCSF), referred to as “Sample Set 1”, consisted of DNA from 1,654 Caucasian patients with varying degrees of coronary artery stenosis as evidenced by coronary angiography. A sample set from the Cleveland Clinic (CCF), referred to as “Sample Set 2”, consisted of DNA from 1,501 Caucasian patients with very little or severe coronary artery stenosis, also evidenced by coronary angiography. All samples were obtained from people between the ages of 18 to 75. All individuals who were included in each study had signed a written informed consent form. The study protocols were IRB approved.

[0413] DNA was extracted from blood samples using conventional DNA extraction methods such as the QIA-amp kit from Qiagen. SNP markers in the extracted DNA samples were analyzed by genotyping. While some samples were individually genotyped, the same samples were also used for pooling studies, in which DNA samples from about 50 individuals were pooled, and allele frequencies were determined in pooled DNA. Genotypes and pool allele frequencies were obtained using a PRISM 7900HT sequence detection PCR system (Applied Biosystems, Foster City, Calif.) by allele-specific PCR, similar to the method described by Germer et al (Germer S., Holland M. J., Higuchi R. 2000, Genome Res. 10: 258-266). Primers for the allele-specific PCR reactions are provided in Table 5.

[0414] Genotype or allele frequency results from 287 SNPs in Sample Set 1 and 177 SNPs in Sample Set 2 were analyzed for association with coronary stenosis. Analysis of the Sample Set 1 data was performed by placing individuals into groups based on quartiles of the sum score and using the two extreme quartiles as a binary endpoint. For Sample Set 2 samples, analysis was done in two ways. One method placed individuals into groups based on quartiles of the sum scores and used the two extreme quartiles as a binary endpoint. The other method placed individuals into groups of sum score “0” (the control group) or the sum score “>0” (the case group). The “sum score” is a measure of the overall extent of coronary artery stenosis and was determined by summing measures of percent stenosis from various arterial locations. The percent stenosis was determined from images obtained using coronary angiography. The case and control groups were further stratified by sex (F, M), age (tertile 1, 2, or 3) and smoking status (“never smoked” and “ever smoked”). The allele or genotype frequencies for the tested SNPs were obtained, and compared between cases and controls. No multiple testing corrections were made.

[0415] Several tests of association were calculated for both unstratified and stratified settings: 1) Fisher's exact test or asymptotic chi-square test for allelic association, 2) asymptotic chi-square test of genotypic association of two different modes of inheritance: dominant and recessive, and 3) Armitage trendtest for the additive mode of genotypic association.

[0416] Effect sizes were estimated through genotypic or allelic odds ratios, including 95% confidence intervals. The reported allele (Allele1) or genotype may be under-represented in cases (with a lower frequency in cases than in controls, indicating that the reported allele or genotype is associated with decreased risk and the other allele or genotype is a risk factor for disease) or over-represented in cases (indicating that the reported allele or genotype is a risk factor for disease).

[0417] The replicated coronary stenosis markers are reported in Table 6. A SNP is considered a replicated marker if the association analyses in two studies showed that the risk allele is the same, the p-values are each less than or equal to 0.05, and the significant association is seen in either the same stratum or in a stratum and its substratum. Table 6 also includes SNPs for which Cochran Mantel Haenszel test showed that the adjusted p-value of the meta analysis was less than 0.05, although the p-value for the individual sample sets might be greater than 0.05. Table 7 provides SNPs having a significant association (p-value of less than or equal to 0.05) with coronary stenosis in either the Sample Set 1 or the Sample Set 2 study.

[0418] An example of a replicated marker, where the homozygous reported allele is associated with a decreased risk for coronary stenosis is hCV1608777 (Table 6). Individuals in the second age tertile (Age T2) with 2 copies of the reported allele of HCV1608777 (Mode Rec) showed significant association (p-values 0.0344 and 0.0076) with decreased risk (odds ratios of 0.51 and 0.19 times of the reference) when compared to those carrying one or none of the reported allele (heterozygotes and major homozygotes) in both the Sample Set 1 and the Sample Set 2 studies. An example of a replicated marker, where the reported allele is associated with increased risk for coronary stenosis is hCV16165996 (Table 6). Among the whole study population (Strata=ALL), carriers of one or two copies of the reported allele (Mode Dom) of HCV16165996 showed significant association (p-values of 0.0306 and 0.0037) with coronary stenosis with an increased risk (odds ratios of 1.31 and 1.69) compared with those carrying none of the reported allele (major homozygotes) in both the Sample Set 1 and the Sample Set 2 studies.

[0419] All publications and patents cited in this specification are herein incorporated by reference in their entirety. Various modifications and variations of the described compositions, methods and systems of the invention will be apparent to those skilled in the art without departing from the scope and spirit of the invention. Although the invention has been described in connection with specific preferred embodiments and certain working examples, it should be understood that the invention as claimed should not be unduly limited to such specific embodiments. Indeed, various modifications of the above-described modes for carrying out the invention that are obvious to those skilled in the field of molecular biology, genetics and related fields are intended to be within the scope of the following claims.

What is claimed is:

1. A method for identifying an individual who has an altered risk for developing stenosis, comprising detecting a single nucleotide polymorphism (SNP) in any one of the nucleotide sequences of SEQ ID NOS:1-284 and 569-26,130 in said individual's nucleic acids, wherein the presence of the SNP is correlated with an altered risk for stenosis in said individual.

2. The method of claim 1 in which the altered risk is an increased risk.

3. The method of claim 2 in which said individual has stenosis.

4. The method of claim 1 in which the altered risk is a decreased risk.

5. The method of claim 1, wherein the SNP is selected from the group consisting of the SNPs set forth in Tables 6 and 7.

6. The method of claim 1 in which detection is carried out by a process selected from the group consisting of: allele-specific probe hybridization, allele-specific primer extension, allele-specific amplification, sequencing, 5′ nuclease digestion, molecular beacon assay, oligonucleotide ligation assay, size analysis, and single-stranded conformation polymorphism.

7. An isolated nucleic acid molecule comprising at least 8 contiguous nucleotides wherein one of the nucleotides is a single nucleotide polymorphism (SNP) selected from any one of the nucleotide sequences in SEQ ID NOS:1-284 and 569-26,130, or a complement thereof.

8. The isolated nucleic acid molecule of claim 7, wherein the SNP is selected from the group consisting of the SNPs set forth in Tables 3 and 4.

9. An isolated nucleic acid molecule that encodes any one of the amino acid sequences in SEQ ID NOS:285-568.

10. An isolated polypeptide comprising an amino acid sequence selected from the group consisting of SEQ ID NOS:285-568.

11. An antibody that specifically binds to a polypeptide of claim 10, or an antigen-binding fragment thereof.

12. The antibody of claim 11 in which the antibody is a monoclonal antibody.

13. An amplified polynucleotide containing a single nucleotide polymorphism (SNP) selected from any one of the nucleotide sequences of SEQ ID NOS:1-284 and 569-26,130, or a complement thereof, wherein the amplified polynucleotide is between about 16 and about 1,000 nucleotides in length.

14. The amplified polynucleotide of claim 13 in which the nucleotide sequence comprises any one of the nucleotide sequences of SEQ ID NOS:1-284 and 569-26,130.

15. An isolated polynucleotide which specifically hybridizes to a nucleic acid molecule containing a single nucleotide polymorphism (SNP) in any one of the nucleotide sequences in SEQ ID NOS:1-284 and 569-26,130.

16. The polynucleotide of claim 15 which is 8-70 nucleotides in length.

17. The polynucleotide of claim 15 which is an allele-specific probe.

18. The polynucleotide of claim 15 which is an allele-specific primer.

19. The polynucleotide of claim 15, wherein the polynucleotide comprises a nucleotide sequence selected from the group consisting of the primer sequences set forth in Table 5 (SEQ ID NOS:26,131-26,415).

20. A kit for detecting a single nucleotide polymorphism (SNP) in a nucleic acid, comprising the polynucleotide of claim 1 5, a buffer, and an enzyme.

21. A method of detecting a single nucleotide polymorphism (SNP) in a nucleic acid molecule, comprising contacting a test sample with a reagent which specifically hybridizes to a SNP in any one of the nucleotide sequences of SEQ ID NOS:1-284 and 569-26,130 under stringent hybridization conditions, and detecting the formation of a hybridized duplex.

22. The method of claim 21 in which detection is carried out by a process selected from the group consisting of: allele-specific probe hybridization, allele-specific primer extension, allele-specific amplification, sequencing, 5′ nuclease digestion, molecular beacon assay, oligonucleotide ligation assay, size analysis, and single-stranded conformation polymorphism.

23. A method of detecting a variant polypeptide, comprising contacting a reagent with a variant polypeptide encoded by a single nucleotide polymorphism (SNP) in any one of the nucleotide sequences of SEQ ID NOS:1-284 and 569-26,130 in a test sample, and detecting the binding of the reagent to the polypeptide.

24. A method for identifying an agent useful in therapeutically or prophylactically treating stenosis, comprising contacting the polypeptide of claim 10 with a candidate agent under conditions suitable to allow formation of a binding complex between the polypeptide and the candidate agent, and detecting the formation of the binding complex, wherein the presence of the complex identifies said agent.

The application's sequence listing, which the Patent Office published only in electronic form, follows.

SEQUENCE LISTING (26415 sequences)

SEQ ID NO: 1 - DNA, 2355 bp, Homo sapiens
gaacagagaaagtggattgaacaaggacgcatttccccagtacatccacaacatgctgtccacatctcgttctcggtttatcagaaataccaacragagcggtgaagaagtcaccaccttttttgattatgattacggtgctccctgtcataaatttgacgtgaagcaaattggggcccaactcctgcctccgctctactcgctggtgttcatctttggttttgtgggcaacatgctggtcrtcctcatcttaataaactgcaaaaagctgaagtgcttgactgacatttacctgctcaacctggccatctctgatctgctttttcttattactctcccattgtgggctcactctgctgcaaatgagtgggtctttgggaatgcaatgtgcaaattattcacagggctgtatcacatcggttattttggcggaatcttcttcatcatcctcctgacaatcgatagatacctggctattgtccatgctgtgtttgctttaaaagccaggacggtcacctttggggtggtgacaagtgtgatcacctggttggtggctgtgtttgcttctgtcccaggaatcatctttactaaatgccagaaagaagattctgtttatgtctgtggcccttattttccacgaggatggaataatttccacacaataatgaggaacattttggggctggtcctgccgctgctcatcatggtcatctgctactcgggaatcctgaaaaccctgcttcggtgtcgaaacgagaagaagaggcatagggcagtgagagtcatcttcaccatcatgattgtttactttctcttctggactccctataayattgtcattctcctgaacaccttccaggaattcttcggcctgagtaactgtgaaagcaccagtcaactggaccaagccacgcaggtgacagagactcttgggatgactcactgctgcatcaatcccatcatctatgccttcgttggggagaagttcagaaggtatctctcggtgttcttccgaaagcacatcaccaagcgcttctgcaaacaatgtccagttttctacagggagacagtggatggagtgacttcaacaaacacrccttccactggggagcaggaagtctcggctggtttataaaacgaggagyagtttgattgttgtttataaagggagataacaatctgtatataacaacaaacttcaagggtttgttgaacaatagaaacctgtaaagcaggtgcccaggaacctcagggctgtgtgtactaatacagactatgtcacccaatgcatatccaacatgtgctcagggaataatccagaaaaactgtgggtagagactttgactctccagaaagctcatctcagctcctgaaaaatgcctcattaccttgtgctaatcctctttttctagtcttcataatttcttcactcaatctctgattctgtcaatgtcttgaaatcaagggccagctggaggtgaagaagagaatgtgacaggcacagatgaatgggagtgagggatagtggggtcagggctgagaggagaaggagggagacatgagcatggctgagcctggacaaagacaaaggtgagcaaagggctcacgcattcagccaggagatgatactggtccttagccccatctgccacgtgtatttaaccttgaagggttcaccaggtcagggagagtttgggaactgcaataacctgggagttttggtggagtccgatgattctcttttgcataagtgcatgacatatttttgctttattacagtttatctatggcacccatgcaccttacatttgaaatctatgaaatatcatgctccattgttcagatgcttcttaggccacatccccctgtctaaaaattcagaaaatttttgtttataaaagatgcattatctatgatatgctaatatatgtatatgcaatatatataggctcttgcttgatctctccaggaggtagtgattatgagaagggggtggagaatgatgagttccttcaccaggagcaaaggacggggatcgtgtggaaccactgcagaactatttccgraatcaactaagtggagagagccaggaaggctgcatcagaacccagtaaagcttcttgtctggatctgagctggtttgttttgtgcttgcttttccctgccttgccactcccctcactcttctcttttccccacagcctttttcacatagctcttggctgtaggattgccccactccaaaaaccagtgtgtggaggtccaggagtgagaccrggaaagaatgtgaaagtgactacacaaggactcctcgatggtcgtgraaaaggaaagtcaattggcagagcccctgaa

SEQ ID NO: 2 - DNA, 2251 bp, Homo sapiens
caggagcagatgtacagggtttgcctgactcacactcaaggttgcataagcaagatttcaaaattaatcctattctggagacctcaacccaatgtacaatgttcctgactggaaaagaagaactatatttttctgattttttttttcaaatctttaccattagttgccctgtatctccgccttcactttctgcaggaaactttatttcctacttctgcatrccaagtttctacctctagatctgtttggtycagttgctgagaagcctgacataccaggactgcctgagacaagccacaagctgaacagagaaagtggattgaacaaggacgcatttccccagtacatccacaacatgctgtccacatctcgttctcggtttatcagaaataccaacragagcggtgaagaagtcaccaccttttttgattatgattacggtgctccctgtcataaatttgacgtgaagcaaattggggcccaactcctgcctccgctctactcgctggtgttcatctttggttttgtgggcaacatgctggtcrtcctcatcttaataaactgcaaaaagctgaagtgcttgactgacatttacctgctcaacctggccatctctgatctgctttttcttattactctcccattgtgggctcactctgctgcaaatgagtgggtctttgggaatgcaatgtgcaaattattcacagggctgtatcacatcggttattttggcggaatcttcttcatcatcctcctgacaatcgatagatacctggctattgtccatgctgtgtttgctttaaaagccaggacggtcacctttggggtggtgacaagtgtgatcacctggttggtggctgtgtttgcttctgtcccaggaatcatctttactaaatgccagaaagaagattctgtttatgtctgtggcccttattttccacgaggatggaataatttccacacaataatgaggaacattttggggctggtcctgccgctgctcatcatggtcatctgctactcgggaatcctgaaaaccctgcttcggtgtcgaaacgagaagaagaggcatagggcagtgagagtcatcttcaccatcatgattgtttactttctcttctggactccctataayattgtcattctcctgaacaccttccaggaattcttcggcctgagtaactgtgaaagcaccagtcaactggaccaagccacgcaggtgacagagactcttgggatgactcactgctgcatcaatcccatcatctatgccttcgttggggagaagttcagaaggtatctctcggtgttcttccgaaagcacatcaccaagcgcttctgcaaacaatgtccagttttctacagggagacagtggatggagtgacttcaacaaacacrccttccactggggagcaggaagtctcggctggtttataaaacgaggagyagtttgattgttgtttataaagggagataacaatctgtatataacaacaaacttcaagggtttgttgaacaatagaaacctgtaaagcaggtgcccaggaacctcagggctgtgtgtactaatacagactatgtcacccaatgcatatccaacatgtgctcagggaataatccagaaaaactgtgggtagagactttgactctccagaaagctcatctcagctcctgaaaaatgcctcattaccttgtgctaatcctctttttctagtcttcataatttcttcactcaatctctgattctgtcaatgtcttgaaatcaagggccagctggaggtgaagaagagaatgtgacaggcacagatgaatgggagtgagggatagtggggtcagggctgagaggagaaggagggagacatgagcatggctgagcctggacaaagacaaaggtgagcaaagggctcacgcattcagccaggagatgatactggtccttagccccatctgccacgtgtatttaaccttgaagggttcaccaggtcagggagagtttgggaactgcaataacctgggagttttggtggagtccgatgattctcttttgcataagtgcatgacatatttttgctttattacagtttatctatggcacccatgcaccttacatttgaaatctatgaaatatcatgctccattgttcagatgcttcttaggccacatccccctgtctaaaaattcagaaaatttttgtttataaaagatgcattatctatgatatgctaatatatgtatatgcaatatatatag

SEQ ID NO: 3 - DNA, 2548 bp, Homo sapiens
caggagcagatgtacagggtttgcctgactcacactcaaggttgcataagcaagatttcaaaattaatcctattctggagacctcaacccaatgtacaatgttcctgactggaaaagaagaactatatttttctgattttttttttcaaatctttaccattagttgccctgtatctccgccttcactttctgcaggaaactttatttcctacttctgcatrccaagtttctacctctagatctgtttggtycagttgctgagaagcctgacataccaggactgcctgagacaagccacaagctgaacagagaaagtggattgaacaaggacgcatttccccagtacatccacaacatgctgtccacatctcgttctcggtttatcagaaataccaacragagcggtgaagaagtcaccaccttttttgattatgattacggtgctccctgtcataaatttgacgtgaagcaaattggggcccaactcctgcctccgctctactcgctggtgttcatctttggttttgtgggcaacatgctggtcrtcctcatcttaataaactgcaaaaagctgaagtgcttgactgacatttacctgctcaacctggccatctctgatctgctttttcttattactctcccattgtgggctcactctgctgcaaatgagtgggtctttgggaatgcaatgtgcaaattattcacagggctgtatcacatcggttattttggcggaatcttcttcatcatcctcctgacaatcgatagatacctggctattgtccatgctgtgtttgctttaaaagccaggacggtcacctttggggtggtgacaagtgtgatcacctggttggtggctgtgtttgcttctgtcccaggaatcatctttactaaatgccagaaagaagattctgtttatgtctgtggcccttattttccacgaggatggaataatttccacacaataatgaggaacattttggggctggtcctgccgctgctcatcatggtcatctgctactcgggaatcctgaaaaccctgcttcggtgtcgaaacgagaagaagaggcatagggcagtgagagtcatcttcaccatcatgattgtttactttctcttctggactccctataayattgtcattctcctgaacaccttccaggaattcttcggcctgagtaactgtgaaagcaccagtcaactggaccaagccacgcaggtgacagagactcttgggatgactcactgctgcatcaatcccatcatctatgccttcgttggggagaagttcagaagcctttttcacatagctcttggctgtaggattgccccactccaaaaaccagtgtgtggaggtccaggagtgagaccrggaaagaatgtgaaagtgactacacaaggactcctcgatggtcgtgraaaaggaaagtcaattggcagagcccctgaagccagtcttcaggacaaagaaggagcctagagacagaaatgacagatctctgctttggaaatcacacgtctggcttcacagatgtgtgattcacagtgtgaatcttggtgtctacgttaccaggcaggaaggctgagaggagagagactccagctgggttggaaaacagtattttccaaactaccttccagttcctcatttttgaatacaggcatagagttcagactttttttaaatagtaaaaataaaattaaagctgaaaactgcaacttgtaaatgtggtaaagagttagtttgagttrctatcatgtcaaacgtgaaaatgctgtattagtcacagagataattctagctttgagcttaagaattttgagcaggtggtatgtttgggagactgctgagtcaacccaatagttgttgattggcaggagttggaagtgtgtgatctgtgggcacattagcctatgtgcatgcagcatctaagtaatgatgtcgtttgaatcacagtatacgctccatcgctgtcatctcagctggatctccattctctcaggcttgctgccaaaagccttttgtgttttgttttgtatcattatgaagtcatgcgtttaatcacattcgagtgtttcagtgcttcgcagatgtccttgatgctcatattgttccctattttgccagtgggaactcctaaatcaarttggcttctaatcaaagcttttaaaccctattggtaaagaatggaaggtggagaagctccctgaagtaagcaaagactttcctcttagtcgagccaagttaagaatgttcttatgttgcccagtgtgtttctgatctgatgcaagcaagaaacactgggcttctagaaccaggcaacttgggaactagactcccaagctggactatggctctactttcaggccacatggctaaagaaggtttcagaaagaagtggggacagagcagaactttcaccttcatatatttgtatgatcctaatgaatgcataaaatgttaagttgatggtgatgaaatgtaaatactgtttttaacaactatgatttggaaaataaatcaatgctataactatgttgataaaag

SEQ ID NO: 4 - DNA, 2675 bp, Homo sapiens
aagacttcctggaagaggtcccagcgtgagtgtcgcttctggcatctgtccttctggccagcctgtggtctggccaagtgatgtaaccctcctctccagcctgtgcacaggcagcctgggaacagctccatccccacccctcagctataaatagggcmtygtgacccggccrggggaagaagctgcygttgttctgggtactacagcagaagggtatgcrgaagcgagcaccccagtctgagatggctcctgccggtgtgagcctgagggccaccatcctctgcctcctggcctgggctggcctggctgcaggtgaccgggtgtacatacaccccttccacctcgtcatccacaatgagagtaccygtgagyagctggcaaaggccaatgccgggaagcccaaagaccccaccttcatacctgctccaattcaggccaagacatcccctgtggatgaaaaggccctacaggaccagctggtgctagtcgctgcaaaacttgacacygaagacaagttgagggccgcaatggtcgggatgctggcyaacttcttgggcttccgtatatatggcatgcacagtgagctatggggcgtggtccatggggccaccgtcctctccccaayggctgtctttggcaccctggcctctctctatctgggagccttggaccacacagctgacaggctacaggcaatcctgggtgttccttggaaggacaagaactgcacctcccggctggatgcgcacaaggtcctgtctgccctgcaggctgtacagggcctgctagtggcccagggcagggctgatagccaggcccagctgctgctgtccayggtggtgggcgtgttcacagccccaggcctgcacctgaagcagccgtttgtgcagggcctggctctctatacccctgtggtcctcccacgctctctggacttcacagaackggatgttgctgctgagaagattgacaggttcatgcaggctgtgacaggatggaagactggctgctccctgaygggagccagtgtggacagcaccctggctttcaacacctacgtccacttccaagggaagatgaagggcttctccctgctggccgagccccaggagttctgggtggacaacagcacctcagtgtctgttcccatgctctctggcatgggcaccttccagcactggagtgacatccaggacaacttctcggtgactcaagtgcccttcactgagagcgcctgcctgctgctgatccagcctcactatgcctctgacctggacaaggtggagggtctcactttccagcaaaactccctcaactggatgaagaaactgtctccccggaccatccacctgaccatgccccaactggygctgcaaggatcttatgacmtgcaggacctgctcgcccaggctgagctgcccgccattctgcacaccgagctgaacctgcaaaaattgagcaatgaccgcatcagggtgggggaggtgctgaacagcattttttttgagcttgaagcggatgagagagagcccacagagtctacccaacagcttaacaagcctgaggtcttggaggtgaccctgaaccgcccattcctgtttgctgtgtatgatcaaagcgccactgccctgcacttcctgggccgcgtggccaacccgctgagcacagcatgaggccagggccccagaacacagtgcctggcaaggcctctgyccctggcctttgaggcaaaggccagcagcagataacaaccccggacaaatcagcgatgtgtcacccccagtctcccaccttttcttctaatgagtcgactttgagctggaaagcagcsgtttctccytggtctaagtgtgctgyatkkagtgagcagtagaagcctgcagcggcacaaatgcacctcccagtttgctgggtttattttagagaatgggggtggggaggcaagaaccagtgtttagcgcgggactactgttccaaaaagaattccarccgaccagcttgtttgtgaaamaaaaaagtgttcccttttcaagttgagaacaaaaattgggttttaaaattaaagtatacatttttgcattgccttcggtttgtakttagtgtcttgaatgtaagaacatgacctccgtgtagtgtctgtaataccttagttttttccacagatgcttgtgatttttgaacaatacgtgaaagatgcaagcacctgaatttctgtttgaatgcggaacmatagctggttatttctcccttgtgttagtaataaacgtcttgccacaataagcctccaaaaattttatctttyatttagcagccaaacagatgtatacaattcagcagatagactgtgcaaacgaaagtgctttcctggactttggatggaatttccatgggaggtctgagccagtacttagcagtcctttgaagttttaggtgatgcttttctctggacacttccattggtaagcagtggtggccatctgtgtgatggacagggggcgggaagagggtgacagggaaggccccataccccatgtggcacctgggaaaggaaccaggcagatgggacttcttccgtcctggtgacacagggccagactgctgctggtattgtgccccgggagtggaaggtagagaaataaatcttcacaaataaatatttgcaattttcccccatc

SEQ ID NO: 5 - DNA, 2285 bp, Homo sapiens
aaagaaaggcgatgctaagaaacrtgctgcaggggaggctggcacattctgctccttagctaaccgcacaggcccatgggtccacacacatcagaccatggctctctgtggtctatctttgccattactttaaccaggctgtttctcatgcgctcatggagggtgactgaagatgccaccccgaggtgcaccctcagcctcgctggacacttacggctcgcattctccagccggaccaggcagttgaggaagtcatcgaagtccagctggagctcctcatccgcatacctgagcacaatcagctgcaggaggtggctgctcagctgaaagcctgtggggacaaaggaggagacccaggactcgctgtatccgagccccgagggtatgcrgaagcgagcaccccagtctgagatggctcctgccggtgtgagcctgagggccaccatcctctgcctcctggcctgggctggcctggctgcaggtgaccgggtgtacatacaccccttccacctcgtcatccacaatgagagtaccygtgagyagctggcaaaggccaatgccgggaagcccaaagaccccaccttcatacctgctccaattcaggccaagacatcccctgtggatgaaaaggccctacaggaccagctggtgctagtcgctgcaaaacttgacacygaagacaagttgagggccgcaatggtcgggatgctggcyaacttcttgggcttccgtatatatggcatgcacagtgagctatggggcgtggtccatggggccaccgtcctctccccaayggctgtctttggcaccctggcctctctctatctgggagccttggaccacacagctgacaggctacaggcaatcctgggtgttccttggaaggacaagaactgcacctcccggctggatgcgcacaaggtcctgtctgccctgcaggctgtacagggcctgctagtggcccagggcagggctgatagccaggcccagctgctgctgtccayggtggtgggcgtgttcacagccccaggcctgcacctgaagcagccgtttgtgcagggcctggctctctatacccctgtggtcctcccacgctctctggacttcacagaackggatgttgctgctgagaagattgacaggttcatgcaggctgtgacaggatggaagactggctgctccctgaygggagccagtgtggacagcaccctggctttcaacacctacgtccacttccaagggaagatgaagggcttctccctgctggccgagccccaggagttctgggtggacaacagcacctcagtgtctgttcccatgctctctggcatgggcaccttccagcactggagtgacatccaggacaacttctcggtgactcaagtgcccttcactgagagcgcctgcctgctgctgatccagcctcactatgcctctgacctggacaaggtggagggtctcactttccagcaaaactccctcaactggatgaagaaactgtctccccggaccatccacctgaccatgccccaactggygctgcaaggatcttatgacmtgcaggacctgctcgcccaggctgagctgcccgccattctgcacaccgagctgaacctgcaaaaattgagcaatgaccgcatcagggtgggggaggtgctgaacagcattttttttgagcttgaagcggatgagagagagcccacagagtctacccaacagcttaacaagcctgaggtcttggaggtgaccctgaaccgcccattcctgtttgctgtgtatgatcaaagcgccactgccctgcacttcctgggccgcgtggccaacccgctgagcacagcatgaggccagggccccagaacacagtgcctggcaaggcctctgyccctggcctttgaggcaaaggccagcagcagataacaaccccggacaaatcagcgatgtgtcacccccagtctcccaccttttcttctaatgagtcgactttgagctggaaagcagcsgtttctccytggtctaagtgtgctgyatkkagtgagcagtagaagcctgcagcggcacaaatgcacctcccagtttgctgggtttattttagagaatgggggtggggaggcaagaaccagtgtttagcgcgggactactgttccaaaaagaattccarccgaccagcttgtttgtgaaamaaaaaagtgttcccttttcaagttgagaacaaaaattgggttttaaaaacatgacctccgtgtagtgtctgtaataccttagttttttccacagatgcttgtgat

SEQ ID NO: 6 - DNA, 2496 bp, Homo sapiens
agctgttaagtcactctgatctctgactgcagctcctactgttggacacacctggccggtgcttcagttagatcaaaccattgctgaaactgaagaggacatgtcaaatattacagatccacagatgtgggattttgatgatctaaatttcactggcatgccacctgcagatgaagattacagcccctgtakgctagaaactgagacactcaacaagtatgttgtgatcatcgcctatgccctrgtrttcctgctgagcctgctgggaaactccctsgtgatgctggtcatcttatacagcagggtcggccgctccgtcactgatgtctacctgctgaacctggccttggccgacctactctttgccctgaccttgcccatctgggcygcctccaaggtgaatggctggatttttggcacattcctgtgcaaggtggtctcactcctgaaggaagtcaacttctayagtggcatcctgctrytggcctgcatcagtgtggaccgttacctggccattgtccatgccacacgcacactgacccagaagcgtcacttggtcaagtttgtttgtcttggctgctggggactgtctatgaatctgtccctgcccttcttccttttccgccaggcttaccatccaaacaattccagtccagtttgctatgaggtcctgggaaatgacacagcaaaatggcggatggtgttgcggatcctgcctcacacctttggcttcatcgtgccgctgtttgtcatgctgttctgctatggattcaccctgcgtacactgtttaaggcccacatggggcagaagcaccgagccatgagggtcatctttgctgtcgtcctcatcttcctgctttgctggctgccctacaacctggtcctgctggcagacaccctcmtgaggacccaggtgatccaggagasctgtgagcgccgcaacaacatcggccgggccctggatgccactgagattctgggatttctccatagctgcctcaaccccatcatctacgccttcatcggccaaaattttcgccatggattcctcaagatcctggctatgcatggcctggtcagcaaggagttcttggcacgtcatcgtgttacctcctacacttcttcgtctgtcaatgtctcttccaacctctgaaaaccatcgatgaaggaatatctcttctcagaaggaaagaataaccaacaccctgaggttgtgtgtggaaggtgatctggctctggacaggcactatctgggttttggggggacgctataggatgtggggaagttaggaactggtgtcttcaggggccacaccaaccttctgaggagctgttgaggtacctccaaggaccggcctttgcacctccatggaaacgaagcaccatcattcccgttgaacgtcacatctttaacccactaactggctaattagcatggccacatctgagccccgaatctgacattagatgagagaacagggctgaagctgtgtcctcatgagggctggatgctctcgttgaccctcacaggagcatctcctcaactctgagtgttaagcgttgagccaccaagctggtggctctgtgtgctctgatccgagctcaggggggtggttttcccatctcaggtgtgttgcagtgtctgctggagacattgaggcaggcactgccaaaacatcaacctgccagctggccttgtgaggagctggaaacacatgttccccttgggggtggtggatgaacaaagagaaagagggtttggaagccagatctatgccacaagaaccccctttacccccatgaccaacatcgcagacacatgtgctggccacctgctgagccccaagtggaacgagacaagcagcccttagcccttcccctctgcagcttccaggctggcrtgcagcatcagcatccctagaaagccatgtgcagccaccagtccattgggcaggcagatgttcctaataaagcttctgttccgtgcttgtccctgtggaagtatcttggttgtgacagagtcaagggtgtgtgcagcattgttggctgttcctgcagtagaatgggggcagcacctcctaagaaggcacctctctgggttgaagggcagtgttccctggggctttaactcctgctagaacagtctcttgaggcacagaaactcctgttcatgcccatacccctggccaaggaagatccctttgtccacaagtaaaaggaaatsctcctccagggagtctcagcttmaccctgaggtgagcatcatcttctgggttaggccttgcctaggcatagccctgcctcaagctatgtgagctcaccagtccctccccaaatgctttccatgagttgcagttttttcctagtctgttttccctccttggagacagggccctgtcggtttrttcactgtatgtccttggtgcctggagcctactaaatgctcaataaataatgatcacaggaatgaaygcatgctgaaaagaccactctttt

SEQ ID NO: 7 - DNA, 2215 bp, Homo sapiens
gcctggacccggcgggcgcacggctccgagyccagcgcagccgagccggtctgcagaggggcccccagaactttgtgtgtgtgtgtgcacgcgcgcgcgtgtgtgcccaggtgcgagggtkcgcgcgtgtgctggcggggagggaaccgacccgaaagagagccccacgctggcaaagtggctcgcccatctcacagccggttggcgctcgcggaggagacatatactgcctggactgcctggctgatgtgagctagtttgtctggttgagttggatgtttaaatagaaggcagaacaacaacagagcacggttcccataagggcggcgagatcagcctcctgtctcatctggaagaccaccactctggggtctcagaggaatgatggaagccttggggtttctaaaattggaagtgaatggccccatggtgayggtggccctgtcagtggctctcttggccctcctgaaatggtactccacatcagcattctcaagactggagaagttaggcctcagacatcccaagccttctcctttcattggaaacttgacatttttccrccagggtttttgggaaagccaaatggagctcagaaagctgtatggacctctgtgtgggtactatcttggtcgtcggatgtttattgttatttctgagccagacatgatcaagcaggtgttggttgagaacttcagtaactttaccaacagaatggcgtcgggtttggagttcaagtcrgtagccgacagcgttctgtttttacgtgacaaaagatgggaagaggtcagaggtgccctgatgtctgctttcagtcctgaaaagctgaacgagatggttcccctcatcagccaagcctgcgamcttmtcctggctcatttaaaacgctatgcggaatctggggacgcatttgacatccagaggtgctactgcaattacaccacagatgtggttgccagcgtcgcstttggcaccccggtggactcctggcaggcccctgaggatccctttgtgaaacactgcaagcgtttcttcgaattctgcatccccagacctatcctggttttactcttatcatttccatccataatggtcccactggcccggattttgcccaataagaaccgagacgaactgaatggcttttttaacraactcattrggaatgtgattgccttgcgggaccagcaagctgccgaagagaggcggagagacttcctccaaatggtcctggatgcccgacattctgcaagtcccatgggcgtgcaagactttgacatcgtcagagacgttttctcctctactgggtgcaagccgaacccttcccggmaacaccagcccagccctatggccaggcctttgactgtggatgagaytgtgggccaggccttcatcttcctcatcgctggctatgaaatcatcaccaacacactttcttttgccacctacstactggccaccaaccctgactgccaagagaagcttctgagagaggtagacgtttttaaggagaaacacatggcccctgagttctgcagcctcraggaagkcctgccctatctggacatggtgattgcagagacgctraggatgtacccgccagctttcagattcacacgggaggcagctsaggactgcgaggtgctggggcagygcatccccrcaggcrctgtgctagagatggcygtgggtgccctgcaccatgaccctgagcactggccaagcccggagamcttcaaccctgaaaggttcacggctgaggccmggcagcagcaccggcccttcacgtacctgcccttcggggccggcccacggagctgcctcggggtgcgtctagggctgcttgaggtcaagttgacactgctccacgtgctgcacaagttccggttccaagcctgccctgagacccaggtaccgctgcagctagaatccaaatctgccctaggtccaaaaaatggtgtctatatcaagatcgtatcccgctgacacagaaggctgccgggtsgggggagggcacccccaaattcaaagaaaaccctaagtgtggatgttcagaattttggaaaaatgtcactgaagtgattgaaagagtgcctggcatgcaaggrtaagaggttctttacataacatttcctaaatgcttaataaacrtttgttgcacttggttttgacattgccaatggggtttgaaccagtgctctctctaaatgaagaa

SEQ ID NO: 8 - DNA, 2069 bp, Homo sapiens
aaggaataaagttgctgattcattcctttacactgaaaccctttgttgtgccctcctcttccttcctctttatagggagacactctgagaaagagcacattgtgggggcccactccatgtgatgtttgcttggttgcctgttcccttttctacctgcagagcacggttcccataagggcggcgagatcagcctcctgtctcatctggaagaccaccactctggggtctcagaggaatgatggaagccttggggtttctaaaattggaagtgaatggccccatggtgayggtggccctgtcagtggctctcttggccctcctgaaatggtactccacatcagcattctcaagactggagaagttaggcctcagacatcccaagccttctcctttcattggaaacttgacatttttccrccagggtttttgggaaagccaaatggagctcagaaagctgtatggacctctgtgtgggtactatcttggtcgtcggatgtttattgttatttctgagccagacatgatcaagcaggtgttggttgagaacttcagtaactttaccaacagaatggcgtcgggtttggagttcaagtcrgtagccgacagcgttctgtttttacgtgacaaaagatgggaagaggtcagaggtgccctgatgtctgctttcagtcctgaaaagctgaacgagatggttcccctcatcagccaagcctgcgamcttmtcctggctcatttaaaacgctatgcggaatctggggacgcatttgacatccagaggtgctactgcaattacaccacagatgtggttgccagcgtcgcstttggcaccccggtggactcctggcaggcccctgaggatccctttgtgaaacactgcaagcgtttcttcgaattctgcatccccagacctatcctggttttactcttatcatttccatccataatggtcccactggcccggattttgcccaataagaaccgagacgaactgaatggcttttttaacraactcattrggaatgtgattgccttgcgggaccagcaagctgccgaagagaggcggagagacttcctccaaatggtcctggatgcccgacattctgcaagtcccatgggcgtgcaagactttgacatcgtcagagacgttttctcctctactgggtgcaagccgaacccttcccggmaacaccagcccagccctatggccaggcctttgactgtggatgagaytgtgggccaggccttcatcttcctcatcgctggctatgaaatcatcaccaacacactttcttttgccacctacstactggccaccaaccctgactgccaagagaagcttctgagagaggtagacgtttttaaggagaaacacatggcccctgagttctgcagcctcraggaagkcctgccctatctggacatggtgattgcagagacgctraggatgtacccgccagctttcagattcacacgggaggcagctsaggactgcgaggtgctggggcagygcatccccrcaggcrctgtgctagagatggcygtgggtgccctgcaccatgaccctgagcactggccaagcccggagamcttcaaccctgaaaggttcacggctgaggccmggcagcagcaccggcccttcacgtacctgcccttcggggccggcccacggagctgcctcggggtgcgtctagggctgcttgaggtcaagttgacactgctccacgtgctgcacaagttccggttccaagcctgccctgagacccaggtaccgctgcagctagaatccaaatctgccctaggtccaaaaaatggtgtctatatcaagatcgtatcccgctgacacagaaggctgccgggtsgggggagggcacccccaaattcaaagaaaaccctaagtgtggatgttcagaattttggaaaaatgtcactgaagtgattgaaagagtgcctggcatgcaaggrtaagaggttctttacataacatttcctaaatgcttaataaacrtttgttgcacttggttttgacattgccaatggggtttgaaccagtgctctctctaaatgaagaa

SEQ ID NO: 9 - DNA, 1906 bp, Homo sapiens
aaggaataaagttgctgattcattcctttacactgaaaccctttgttgtgccctcctcttccttcctctttatagggagacactctgagaaagagcacattgtgggggcccactccatgtgatgtttgcttggttgcctgttcccttttctacctgcagagcacggttcccataagggcggcgagatcagcctcctgtctcatctggaagaccaccactctggggtctcagaggaatgatggaagccttggggtttctaaaattggaagtgaatggccccatggtgayggtggccctgtcagtggctctcttggccctcctgaaatggtactccacatcagcattctcaagactggagaagttaggcctcagacatcccaagccttctcctttcattggaaacttgacatttttccrccagggtttttgggaaagccaaatggagctcagaaagctgtatggacctctgtgtgggtactatcttggtcgtcggatgtttattgttatttctgagccagacatgatcaagcaggtgttggttgagaacttcagtaactttaccaacagaatggcgtcgggtttggagttcaagtcrgtagccgacagcgttctgtttttacgtgacaaaagatgggaagaggtcagaggtgccctgatgtctgctttcagtcctgaaaagctgaacgagatggttcccctcatcagccaagcctgcgamcttmtcctggctcatttaaaacgctatgcggaatctggggacgcatttgacatccagaggtgctactgcaattacaccacagatgtggttgccagcgtcgcstttggcaccccggtggactcctggcaggcccctgaggatccctttgtgaaacactgcaagcgtttcttcgaattctgcatccccagacctatcctggttttactcttatcatttccatccataatggtcccactggcccggattttgcccaataagaaccgagacgaactgaatggcttttttaacraactcattrggaatgtgattgccttgcgggaccagcaagctgccgaagagaggcggagagacttcctccaaatggtcctggatgcccgacattctgcaagtcccatgggcgtgcaagactttgacatcgtcagagacgttttctcctctactgggtgcaagccgaacccttcccggmaacaccagcccagccctatggccaggcctttgactgtggatgagaytgtgggccaggccttcatcttcctcatcgctggctatgaaatcatcaccaacacactttcttttgccacctacstactggccaccaaccctgactgccaagagaagcttctgagagaggtagacgtttttaaggagaaacacatggcccctgagttctgcagcctcraggaagkcctgccctatctggacatggtgattgcagagacgctraggatgtacccgccagctttcagattcacacgggaggcagctsaggactgcgaggtgctggggcagygcatccccrcaggcrctgtgctagagatggcygtgggtgccctgcaccatgaccctgagcactggccaagcccggagamcttcaaccctgaaaggtaccgctgcagctagaatccaaatctgccctaggtccaaaaaatggtgtctatatcaagatcgtatcccgctgacacagaaggctgccgggtsgggggagggcacccccaaattcaaagaaaaccctaagtgtggatgttcagaattttggaaaaatgtcactgaagtgattgaaagagtgcctggcatgcaaggrtaagaggttctttacataacatttcctaaatgcttaataaacrtttgttgcacttggttttgacattgccaatggggtttgaaccagtgctctctctaaatgaagaa

SEQ ID NO: 10 - DNA, 965 bp, Homo sapiens
gaaaaagctggagcaaccaagcagggcctacaagccgaggagggctgtttaaaggcgcaggggccattttaccctccaggttggccctgctcaggaccaggaggaaacacctccagcccgcgacctcctcccacagggggaaaaggaaagcaggaggaccacagaagctttggcaccgaggatccccgcagtcttcacccgcggagattccggctgaaggagctgtccagcgactacaccgctaagcgcagggagcccaagcctccgcaccggattccggagcmcaagctccaccgcgcatgcgcacacgccccagacccaggctcaggcaagccgactgagaattttctgaccgcagtgcaccatgggaaggtaactctgaagtttccataattcctgggctccagaaagaagaaaaggcggccgtggagagacgaagacttcatgtgctgaaagctctgaagaagctaaggattgagsctgatgaggccccagttgttgctgtgctgggctcaggcggaggactgcgggctcacattgcctgccttggggtcctgagtgagatgaaagaacagggcctgttggatgccgtcacgtacctcgcaggggtctctggatccacttgggcaatatcttctctctacaccaatgatggtgacatggaagctctcgaggctgacctgaaacatcgatttacccgacaggagtgggacttggctaagagcctacagaaaaccatccaagcagygaggtctgagaattactctctgaccgacttctgggcctacatgkttrtctctaagcaaaccrgagaactgcyggagtctcatttgtccaatatgaagaagcccgtggaagaagggacactaccctacccratatttgcagccattgacaatgacctgcaaccttcctggcaggaggcaagagcaccaggtaagcaaacatttagagggagggagagg

SEQ ID NO: 11 - DNA, 2944 bp, Homo sapiens
cacggatgaaaatagctccgggtgagctctggaacagctgaaaaagctggagcaaccaagcagggcctacaagccgaggagggctgtttaaaggcgcaggggccattttaccctccaggttggccctgctcaggaccaggaggaaacacctccagcccgcgacctcctcccacagggggaaaaggaaagcaggaggaccacagaagctttggcaccgaggatccccgcagtcttcacccgcggagattccggctgaaggagctgtccagcgactacaccgctaagcgcagggagcccaagcctccgcaccggattccggagcmcaagctccaccgcgcatgcgcacacgccccagacccaggctcagagtttcactcttgttgcccagactggagtgcaatggcatgatctctgctcactggcacctccacctcctgagttcaagtgattctcctccctcagcctcctgagtagctgggattacaggcgcccgccatcatgcccaggaggactgagaattttctgaccgcagtgcaccatgggaagctctgaagtttccataattcctgggctccagaaagaagaaaaggcggccgtggagagacgaagacttcatgtgctgaaagctctgaagaagctaaggattgagsctgatgaggccccagttgttgctgtgctgggctcaggcggaggactgcgggctcacattgcctgccttggggtcctgagtgagatgaaagaacagggcctgttggatgccgtcacgtacctcgcaggggtctctggatccacttgggcaatatcttctctctacaccaatgatggtgacatggaagctctcgaggctgacctgaaacatcgatttacccgacaggagtgggacttggctaagagcctacagaaaaccatccaagcagygaggtctgagaattactctctgaccgacttctgggcctacatgkttrtctctaagcaaaccrgagaactgcyggagtctcatttgtccaatatgaagaagcccgtggaagaagggacactaccctacccratatttgcagccattgacaatgacctgcaaccttcctggcaggaggcaagagcaccagagacctggttcgagttcacccctcaccacgctggcttcyctgcactgggggcctttgtttccataacccacttcggaagcaaattcaagaagggaagactggtcagaactcaccctgagagagacctgactttcctgagaggtttatggggaagtgctcttggtaacactgaagtcattagggaatacatttttgaccagttaaggaatctgaccctgaaaggtttatggagaagggctgttgctaatgctaaaagcattggacaccttatttttgcccgattactgaggctgcaagaaagttcacaaggggaacatcctcccccagaagatgaaggcggtgagcctgaacacacctggctgactgagatgctcgagaaytggaccaggacctccctggaaaagcaggagcagccccatgaggaccccgaaaggaaaggctcactcagtaacttgatggattttgtgaagaaaacaggcatttgcgcttcaaagtgggaatgggggaccmctcacaacttcctgtacaaacacgagtttgactcttttcatcagcaagaggaaccattcccagaggtactgtcttagtctgctcaggctgctgtgacaaaatcccacagactgggtgacttaaacgacagacatttattttctcacagttctcaaggctggaagtccaaaatcaagttgtctgtgggacttgctttcgctttgcactgtggactcaccctgaattctttcttgtatgagatccaagaaccctttcttggggtctggatcgggacccctttccagtaactgatgaaggctccaggtggcatccgggacaagataatgagcagccggaagcacctccacctggtggatgctggtttagccatcaacactcccttcccactcgtgctgcccccgacgcgggaggttcacctcatcctctccttcgacttcagtgccggagatcctttcgagaccatccrggctaccactgaytactgccgccgccacaagatcccctttccccaagtagaagaggctgagctggatttgtggtccaaggcccccgccagctgctacatcctgaaaggagaaactggaccagtggtgatgcattttcccytgttcaacatagatgcctgtggaggtgatattgaggcatggagtgacacatacgacacattcaagcttgctgacacctacactctagatgtggtggtgctactcttggcattagccaagaagaatgtcagggaaaacaagaagaagatccttagagagttgatgaacgtggccgggctctactacccgaaggatagtgcccgaagttgctgcttggcatagatgagcctcagcttccagggcactgtgggcctgttgrtctactagggccctgawgtccacctggccttcctgttcttcactcccttcagccacacgcttcatggccttgagttcaccttggctgtcctaacarggccaatcaccagtgaccagctagactgtgattttgatagcgtcattcagaagaaggygtccaaggagctgaagrtggtgaaatttgtcctgcaggtcccycgggagatcctggagctggagcatgagtgtctgacaatcagaagcatcatgtycaatgtccagatggccagaatgaatgtgatagttcagaccaatgccttccactgctcctttatgactgcacttctagccagtagctctgcacaagttagctctgtagaagtaagaacttgggcttaaatcatgggctatctctccacagccaagtggagctctgagaatacaacaagtgctcaataaatgcttgctgattgactgatggattag

SEQ ID NO: 12 - DNA, 2665 bp, Homo sapiens
cacggatgaaaatagctccgggtgagctctggaacagctgaaaaagctggagcaaccaagcagggcctacaagccgaggagggctgtttaaaggcgcaggggccattttaccctccaggttggccctgctcaggaccaggaggaaacacctccagcccgcgacctcctcccacagggggaaaaggaaagcaggaggaccacagaagctttggcaccgaggatccccgcagtcttcacccgcggagattccggctgaaggagctgtccagcgactacaccgctaagcgcagggagcccaagcctccgcaccggattccggagcmcaagctccaccgcgcatgcgcacacgccccagacccaggctcagagtttcactcttgttgcccagactggagtgcaatggcatgatctctgctcactggcacctccacctcctgagttcaagtgattctcctccctcagcctcctgagtagctgggattacaggcgcccgccatcatgcccaggaggactgagaattttctgaccgcagtgcaccatgggaagctctgaagtttccataattcctgggctccagaaagaagaaaaggcggccgtggagagacgaagacttcatgtgctgaaagctctgaagaagctaaggattgagsctgatgaggccccagttgttgctgtgctgggctcaggcggaggactgcgggctcacattgcctgccttggggtcctgagtgagatgaaagaacagggcctgttggatgccgtcacgtacctcgcaggggtctctggatccacttgggcaatatcttctctctacaccaatgatggtgacatggaagctctcgaggctgacctgaaacatcgatttacccgacaggagtgggacttggctaagagcctacagaaaaccatccaagcagygaggtctgagaattactctctgaccgacttctgggcctacatgkttrtctctaagcaaaccrgagaactgcyggagtctcatttgtccaatatgaagaagcccgtggaagaagggacactaccctacccratatttgcagccattgacaatgacctgcaaccttcctggcaggaggcaagagcaccagagacctggttcgagttcacccctcaccacgctggcttcyctgcactgggggcctttgtttccataacccacttcggaagcaaattcaagaagggaagactggtcagaactcaccctgagagagacctgactttcctgagaggtttatggggaagtgctcttggtaacactgaagtcattagggaatacatttttgaccagttaaggaatctgaccctgaaaggtttatggagaagggctgttgctaatgctaaaagcattggacaccttatttttgcccgattactgaggctgcaagaaagttcacaaggggaacatcctcccccagaagatgaaggcggtgagcctgaacacacctggctgactgagatgctcgagaaytggaccaggacctccctggaaaagcaggagcagccccatgaggaccccgaaaggaaaggctcactcagtaacttgatggattttgtgaagaaaacaggcatttgcgcttcaaagtgggaatgggggaccmctcacaacttcctgtacaaacacggtggcatccgggacaagataatgagcagccggaagcacctccacctggtggatgctggtttagccatcaacactcccttcccactcgtgctgcccccgacgcgggaggttcacctcatcctctccttcgacttcagtgccggagatcctttcgagaccatccrggctaccactgaytactgccgccgccacaagatcccctttccccaagtagaagaggctgagctggatttgtggtccaaggcccccgccagctgctacatcctgaaaggagaaactggaccagtggtgatgcattttcccytgttcaacatagatgcctgtggaggtgatattgaggcatggagtgacacatacgacacattcaagcttgctgacacctacactctagatgtggtggtgctactcttggcattagccaagaagaatgtcagggaaaacaagaagaagatccttagagagttgatgaacgtggccgggctctactacccgaaggatagtgcccgaagttgctgcttggcatagatgagcctcagcttccagggcactgtgggcctgttgrtctactagggccctgawgtccacctggccttcctgttcttcactcccttcagccacacgcttcatggccttgagttcaccttggctgtcctaacarggccaatcaccagtgaccagctagactgtgattttgatagcgtcattcagaagaaggygtccaaggagctgaagrtggtgaaatttgtcctgcaggtcccycgggagatcctggagctggagcatgagtgtctgacaatcagaagcatcatgtycaatgtccagatggccagaatgaatgtgatagttcagaccaatgccttccactgctcctttatgactgcacttctagccagtagctctgcacaagttagctctgtagaagtaagaacttgggcttaaatcatgggctatctctccacagccaagtggagctctgagaatacaacaagtgctcaataaatgcttgctgattgactgatggattag

SEQ ID NO: 13 - DNA, 2526 bp, Homo sapiens
cacggatgaaaatagctccgggtgagctctggaacagctgaaaaagctggagcaaccaagcagggcctacaagccgaggagggctgtttaaaggcgcaggggccattttaccctccaggttggccctgctcaggaccaggaggaaacacctccagcccgcgacctcctcccacagggggaaaaggaaagcaggaggaccacagaagctttggcaccgaggatccccgcagtcttcacccgcggagattccggctgaaggagctgtccagcgactacaccgctaagcgcagggagcccaagcctccgcaccggattccggagcmcaagctccaccgcgcatgcgcacacgccccagacccaggctcaggaggactgagaattttctgaccgcagtgcaccatgggaagctctgaagtttccataattcctgggctccagaaagaagaaaaggcggccgtggagagacgaagacttcatgtgctgaaagctctgaagaagctaaggattgagsctgatgaggccccagttgttgctgtgctgggctcaggcggaggactgcgggctcacattgcctgccttggggtcctgagtgagatgaaagaacagggcctgttggatgccgtcacgtacctcgcaggggtctctggatccacttgggcaatatcttctctctacaccaatgatggtgacatggaagctctcgaggctgacctgaaacatcgatttacccgacaggagtgggacttggctaagagcctacagaaaaccatccaagcagygaggtctgagaattactctctgaccgacttctgggcctacatgkttrtctctaagcaaaccrgagaactgcyggagtctcatttgtccaatatgaagaagcccgtggaagaagggacactaccctacccratatttgcagccattgacaatgacctgcaaccttcctggcaggaggcaagagcaccagagacctggttcgagttcacccctcaccacgctggcttcyctgcactgggggcctttgtttccataacccacttcggaagcaaattcaagaagggaagactggtcagaactcaccctgagagagacctgactttcctgagaggtttatggggaagtgctcttggtaacactgaagtcattagggaatacatttttgaccagttaaggaatctgaccctgaaaggtttatggagaagggctgttgctaatgctaaaagcattggacaccttatttttgcccgattactgaggctgcaagaaagttcacaaggggaacatcctcccccagaagatgaaggcggtgagcctgaacacacctggctgactgagatgctcgagaaytggaccaggacctccctggaaaagcaggagcagccccatgaggaccccgaaaggaaaggctcactcagtaacttgatggattttgtgaagaaaacaggcatttgcgcttcaaagtgggaatgggggaccmctcacaacttcctgtacaaacacggtggcatccgggacaagataatgagcagccggaagcacctccacctggtggatgctggtttagccatcaacactcccttcccactcgtgctgcccccgacgcgggaggttcacctcatcctctccttcgacttcagtgccggagatcctttcgagaccatccrggctaccactgaytactgccgccgccacaagatcccctttccccaagtagaagaggctgagctggatttgtggtccaaggcccccgccagctgctacatcctgaaaggagaaactggaccagtggtgatgcattttcccytgttcaacatagatgcctgtggaggtgatattgaggcatggagtgacacatacgacacattcaagcttgctgacacctacactctagatgtggtggtgctactcttggcattagccaagaagaatgtcagggaaaacaagaagaagatccttagagagttgatgaacgtggccgggctctactacccgaaggatagtgcccgaagttgctgcttggcatagatgagcctcagcttccagggcactgtgggcctgttgrtctactagggccctgawgtccacctggccttcctgttcttcactcccttcagccacacgcttcatggccttgagttcaccttggctgtcctaacarggccaatcaccagtgaccagctagactgtgattttgatagcgtcattcagaagaaggygtccaaggagctgaagrtggtgaaatttgtcctgcaggtcccycgggagatcctggagctggagcatgagtgtctgacaatcagaagcatcatgtycaatgtccagatggccagaatgaatgtgatagttcagaccaatgccttccactgctcctttatgactgcacttctagccagtagctctgcacaagttagctctgtagaagtaagaacttgggcttaaatcatgggctatctctccacagccaagtggagctctgagaatacaacaagtgctcaataaatgcttgctgattgactgatggattag

SEQ ID NO: 14 - DNA, 2488 bp, Homo sapiens
cgaccagcctgtggcgtggttggggctccggaagggcgcgcgcgagcgcttttttgggaggacaccacaggtggacgcctcagctgatcgtcctccctcccggggaccctgccccgagtcgccgagtagccgcagagtcgcctccgtcsccccgccgcccctgtgtttcggacatggccgcacgccttctccgagggtccctacgcgtcctgggcggccaccgtgcgccgcgccagctgcccgccgcgcgatgttctcattccggaggggaagaacgtctagaaaytccttctgctaaaaaattaacagatataggaattcgaagaatcttttctccagagcatgacattttccggaaaagtgtaaggaagtttttccaagaagaagtgattcctcatcactcagaatgggagaaagctggagaagtaagtagggaggtttgggaaaaagctggaaaacaaggactgcttggtgtcaatattgcagagcatcttggtggaattggaggggatctgtactccgcagctattgtctgggaggagcaagcttattcaaattgttcaggcccaggttttagtattcattcaggtattgtcatgtcctatattacaaaccatggctcagaagaacagattaagcactttattccccagatgactgcaggcaaatgtattggtgcaatagcaatgacagagcctggagctggaagtgacttacagggaataaaaacaaatgctaaaaaggatggaagtgactggattctcaatggaagcaaggtgttcatcagtaatgggtcattaagtgatgttgtgattgtagttgcggtcacaaatcatgaagctccctcccctgcccatggtattagcctttttctggtggaaaatggaatgaaaggatttatcaagggacgaaagctacataaaatgggattaaaagcccaggataccgcagaactattctttgaagatatacggttgccagctagtgccctacttggagaagagaataaaggcttctattacatcatgaaagagcttccacaggaaaggctgttaattgctgatgtggcaatttcagctastgaattcatgtttgaagaaaccaggaactatgttaaacaaagaaaagcttttggcaaaacagttgctcacctacagacagtgcaacatmaattagcagaattaaaaacacatatatgtgtaacccgagcatttgtggacaactgtctccagctgcatgaagcgaaacgtttggactccgccactgcttgcatggcgaaatattgggcatctgagttacaaaatagtgtagcttacgactgtgtacagctccatggaggttggggatacatgtgggagtacccaattgcaaaagcttatgtggatgccagagttcagccaatctatggtggtacaaatgaaataatgaaggagctgattgcaagagagattgtctttgacaagtagacatctgcccacatcctggagtcctattacagctaatctcgttttaaatctgctcaagataaaatgtaacttggaaagcgaggaaacactaaacatgtttttacctgctctctctatagagaaggaaataaaatataaatataagattaacacagtggaaggacaaatctttgaagccaaaattctagttttccaatataaggtttaacttacagttttttatgtagccaaaggtaaacggttttctgaatcttgcctaggtgtttcatttatctctaaaattctaaaaagcataaatcattcaaatcttcaaaccaaggcagaaataattttatgtcgctmtagtataaaaacattaataagatagcacattgacttttaaagggaaaagtaaatataacttagcatgtaaactcatttcggctaccatttgctccaaattccctagaacagtggtttttaccactgtactccaaccccgtttttaagcaatggaactctttcttcaaacaaaagcttatgcagaacatctctgtgaaacgctgctgagtgagaactgctttcattgaagctggaagccatcataccttactgccttgaaacccctaggactcagctaagtatttgcctaaccctgaccagggaatgccttggttctgtcaattgctgacatctgagaacacagaataatccatcatttttaatttcaagatattggtacattttataggtatcaaagcaatggcttttcttttgcaacagttaatgtatttattaacttaataattactttatgtcttctataaaccaggctgttaatacaatgatgacaaacaaaactggcaagatcactaaaaaataagtgaataaacaaataagtagtaaaataaggtaagaagtaaatatgtaaaagagataatttcaagcataagtgcaatgtaaataataaagtaagcatttaaaattcaaaagtgaggaaatgacatttgatttaagacttaaaagtaattacaaaaaataaa

SEQ ID NO: 15 - DNA, 6428 bp, Homo sapiens
cagccgcccctcctgcggccgctgcgggggccgccgcctgacttcggacaccggccccgcacccgccaggaggggagggaaggggaggcggggagagcgacggcggggggcgggcggtggaccccgcctcccccggcacagcctgctgaggggaagagggggtctccgctcttcctcagtgcactctctgactgaagcccggcgcgtggggtgcagcgggagtgcgaggggactggacaggtgggaagatgggaatgaggaccgggcggcgggaatgttctcacttctccggattccaccgggatgcaggactctagctgcccagccgcacctgcgaagagactacacttcccgaggtgctcagcggcagcgagggcctccacgcatgcgcaccgcggcgcgctgggcggggctggatgggctgtggtgggagggttgcagcgccgcgagaaaggcgagccgggccgggggcggggaaaggggtggggcaggaacgggggcggggacggcgctggaggggcgggtcgggtaggtctcccggagctgatgtgtactgtgtgcgccggggaggcgccggcttgtactcggcagcgcgggaataaagtttgctgatttggtgtctagcctggatgcctgggttgcaggccctgcttgtggtggcgctccacagtcatccggctgaagaagacctgttggactggatcttctcgggttttctttcagatattgttttgtatttacccatgaagacattgtttttyggactctgcaaataggacatttcaaagatgagtgaaaaaaaattggaaacaactgcacagcagcggaaatgtcctgaatggatgaatgtgcagaataaaagatgtgctgtagaagaaagaarggcatgtgttcrgaagagtgtttttgaagatgacctccccttcttagaattcactggatccattgtgtatagttacgatgctagtgattgctctttcctgtcagaagatattagcatgagtctatcagatggggatgtggtgggatttgacatggagtggccaccattatacaatagagggaaacttggcaaagttgcactaattcagttgtgtgtttctgagagcaaatgttacttgttccacrtttcttccatgtcagtttttccccagggattaaaaatgttgcttgaaaataaagcagttaaaaaggcaggtgtaggaattgaaggagatcagtggaaacttctacgtgactttgatatcaaattgaagaattttgtggagttgacagatgttgccaataaaaagctgaaatgyacagagacctggagccttaacagtctggttaaacacctcttaggtaaacagctcctgaaagacaagtctatccgctgtagcaattggagtaaatttcctctcactgaggaccagaaactgtatgcagccactgatgcttatgctggttttattatttaccgaaatttagagattttggatgatactgtgcaaaggtttgctataaataaagaggaagaaatcctacttagcgacatgaacaaacagttgacttcaatctctgaggaagtgatggatctggctaagcatcttcctcatgctttcagtaaattggaaaacccacggagggtttctatcttactaaaggatatttcagaaaatctatattcactgaggaggatgataattgggtctactaacattgagactgaactgaggcccagcaataatttaaacttattatcctttgaagattcaactactgggggagtacaacagaaacaaattagagaacatgaagttttaattcacgttgaagatgaaacatgggacccaacacttgatcatttagctaaacatgatggagaagatgtacttggaaataaagtggaacgaaaagaagatggatttgaagatggagtagaagacaacaaattgaaagaraatatrgaaagagcttgtttgatgtcgttagatattacagaacatgaactccaaattttggaacagcagtctcaggaagaatatcttagtgatattgcttataaatctactgagcatttatctcccaatgataatgaaaacgatacgtcctatgtaattgagagtgatgaagatttagaaatggagatgcttaagtctttagaaaacctcaatagtggcacggtagaaccaactcattctaaatgcttaaaaatggaaagaaatctgggtcttcctactaaagaagaagaagaagatgatgaaaatgaagctaatgaaggggaagaagatgatgataaggactttttgtggccagcacccaatgaagagcaagttacttgcctcaagatgtactttggccattccagttttaaaccagttcagtggaaagtgattcattcagtattagaagaaagaagagataatgttgctgtcatggcaactggatatggaaagagtttgtgcttccagtatccacctgtttatgtaggcaagattggccttgttatctctccccttatttctctgatggaagaccaagtgctacagcttaaaatgtccaacatcccagcttgcttccttggatcagcacagtcagaaaatgttctaacagatattaaattaggtaaataccggattgtatacgtaactccagaatactgttcaggtaacatgggcctgctccagcaacttgaggctgatattggtatcacgctcattgctgtggatgaggctcactgtatttctgagtgggggcatgattttagggattcattcaggaagttgggctccctaaagacagcactgccaatggttccaatcgttgcacttactgctactgcaagttcttcaatccgggaagacattgtacgttgcttaaatctgagaaatcctcagatcacctgtactggttttgatcgaccaaacctgtatttagaagttaggcgaaaaacagggaatatcctkcaggatctgcagccatttcttgtcaaaacaagttcccactgggaatttgaaggtccaacaatcatctactgtccttctagaaaaatgacacaacaagttacaggtgaacttaggaaactkaatctatcctgtggaacataccatgcgggcatgagttttagcacaaggaaagacattcatcataggtttgtaagagatgaaattcagtgtgtcatagctaccatagcttttggaatgggcattaataaagctgacattcgccaagtcattcattacggtgctcctaaggacatggaatcatattatcaggagattggtagagctggtcgtgatggacttcaaagttcttgtcacgtcctctgggctcctgcagacattaacttaaataggcaccttcttactgagatacgtaatgagaagtttcgattatacaaattaaagatgatggcaaagatggaaaaatatcttcattctagcagatgtaggagacaaatcatcttgtctcattttgaggacaaacaagtacaaaaagcctccttgggaattatgggaactgaaaaatgctgtgataattgcaggtccagattggatcattgctattccatggatgactcagaggatacatcctgggactttggtccacaagcatttaagcttttgtctgctgtggacatcttaggcgaaaaatttggaattgggcttccaattttatttctccgaggatctaattctcagcgtcttgccgatcaatatcgcaggcacagtttatttggcactggcaaggatcaaacagagagttggtggaaggctttttcccgtcagctgatcactgagggattcttggtagaagtttctcggtataacaaatttatgaagatttgcgcccttacgaaaaagggtagaaattggcttcataaagctaatacagaatctcagagcctcatccttcaagctaatgaagaattgtgtccaaagaagttkcttctgcctagttygaaaactgtatcttcgggcaccaaagagcattgttataatcaagtaccagttgaattaagtacagagaagaagtctaacttggagaagttatattcttataaaccatgtgataagatttcttctgggagtaacatttctaaaaaaagtatcatggtacagtcaccagaaaaagcttacagttcctcacagcctgttatttcggcacaagagcaggagactcagattgtgttatatggcaaattggtagaagctaggcagaaacatgccaataaaatggatgttcccccagctattctggcaacaaacaagatactggtggatatggccaaaatgagaccaactacggttgaaaacgtaaaaaggattgatggtgtttctgaaggcaaagctgccatgttggcccctctgttggaagtcatcaaacatttctgccaaacaaatagtgttcagacagacctcttttcaagtacaaaacctcaagaagaacagaagacgagtctggtagcaaaaaataaaatatgcacactttcacagtctatggccatcacatactctttattccaagaaaagaagatgcctttgaagagcatagctgagagcaggattctgcctctcatgacaattggcatgcacttatcccaagcggtgaaagctggctgcccccttgatttggagcgagcaggcctgactccagaggttcagaagattattgctgatgttatccgaaaccctcccgtcaactcagatatgagtaaaattagcctaatcagaatgttagttcctgaaaacattgacacgtaccttatccacatggcaattgagatccttaaacatggtcctgacagyggacttcaaccttcaygtgatgtcaacaaaaggagatgttttcccggttctgaagagatctgttcaagttctaagagaagcaaggaagaagtaggcatcaatactgagacttcatctgcagagagaaagagacgattacctgtgtggtttgccaaaggaagtgataccagcaagaaattaatggacaaaacgaaaasgggaggtctttttagttaagctggcaattaccagaacaattatgtttcttgctgtattataagaggatagctatattttatttctgaagagtaaggagtagtattttggcttaaaaatcattctaattacaaagttcactgtttattgaagaactggcatcttaaatcagccttccgcaattcatgtagtttctgggtcttctgggagcctacgtgagtacatcacctaacagaatattaaattagacttcctgtaagattgctttaagaaactgttactgtcctgttttctaatctctttattaaaacagtgtatttggaaaatgttatgtgctctgatttgatatagataacagattagtagttacatggtaattatgtgatataaaatattcatatattatcaaaattctgttttgtaaatgtaagaaagcatagttattttacaaattgtttttactgtcttttgaagaagttcttaaatacgttgttaaatggtattagttgaccagggcagtgaaaatgaaaccgcattttgggtgccattaaatagggaaaaaacatgtaaaaaatgtaaaatggagaccaattgcactaggcaagtgtatattttgtattttatatacaatttctattatttttcaagtaataaaacaatgtttttcatactgaatattatatatatattttttagctttcatttacttaattattttaagtacctttatttttccaggatgtcagaatttgattctaatctctcttatgtagcacatgtgacttaatttaaaacctatactgtgacacagagttgggtaaacgatgattatttaactttaagcagttcaccatccatttcaaagcctttgattggcttttttgtaaataaaaataacttgttaagaaacaaatatatctgtcatagaagaactagaaaatccagggaagtgagaaaaatgaaaataaaaatcattcatagttttactagtagctaatcacagtcaacctcttttgtgtatcccaccagacttttttatattcatttgtttttagktaaaatataaaagtctcgtatattcccatttttctgcattgcattachagaaggtagtggcgcctattaaatatgtgatatgttgttgtccagccatggcttctgcatttgcatgcttttgtgtgtgcatctgcaataccctgtgaatatcctgtgtgatggagtggcaagtacgcacagacacgtctgctgcatgcctaggtacgaggctgtctccaggagaagcacttgtttgattatttgagttgccaattgaatttgctgctttttttcatggcttgccattttcactgaaaagaatgactaatgaaaaacgatgattggttattagatttggatgtttggcagacattttctcaaaattgaactaagttggcctcttcacgg

SEQ ID NO: 16 - DNA, 6431 bp, Homo sapiens
cagccgcccctcctgcggccgctgcgggggccgccgcctgacttcggacaccggccccgcacccgccaggaggggagggaaggggaggcggggagagcgacggcggggggcgggcggtggaccccgcctcccccggcacagcctgctgaggggaagagggggtctccgctcttcctcagtgcactctctgactgaagcccggcgcgtggggtgcagcgggagtgcgaggggactggacaggtgggaagatgggaatgaggaccgggcggcgggaatgttctcacttctccggattccaccgggatgcaggactctagctgcccagccgcacctgcgaagagactacacttcccgaggtgctcagcggcagcgagggcctccacgcatgcgcaccgcggcgcgctgggcggggctggatgggctgtggtgggagggttgcagcgccgcgagaaaggcgagccgggccgggggcggggaaaggggtggggcaggaacgggggcggggacggcgctggaggggcgggtcgggtaggtctcccggagctgatgtgtactgtgtgcgccggggaggcgccggcttgtactcggcagcgcgggaataaagtttgctgatttggtgtctagcctggatgcctgggttgcaggccctgcttgtggtggcgctccacagtcatccggctgaagaagacctgttggactggatcttctcgggttttctttcagatattgttttgtatttacccatgaagacattgtttttyggactctgcaaataggacatttcaaagatgagtgaaaaaaaattggaaacaactgcacagcagcggaaatgtcctgaatggatgaatgtgcagaataaaagatgtgctgtagaagaaagaarggcatgtgttcrgaagagtgtttttgaagatgacctccccttcttagaattcactggatccattgtgtatagttacgatgctagtgattgctctttcctgtcagaagatattagcatgagtctatcagatggggatgtggtgggatttgacatggagtggccaccattatacaatagagggaaacttggcaaagttgcactaattcagttgtgtgtttctgagagcaaatgttacttgttccacrtttcttccatgtcagtttttccccagggattaaaaatgttgcttgaaaataaagcagttaaaaaggcaggtgtaggaattgaaggagatcagtggaaacttctacgtgactttgatatcaaattgaagaattttgtggagttgacagatgttgccaataaaaagctgaaatgyacagagacctggagccttaacagtctggttaaacacctcttaggtaaacagctcctgaaagacaagtctatccgctgtagcaattggagtaaatttcctctcactgaggaccagaaactgtatgcagccactgatgcttatgctggttttattatttaccgaaatttagagattttggatgatactgtgcaaaggtttgctataaataaagaggaagaaatcctacttagcgacatgaacaaacagttgacttcaatctctgaggaagtgatggatctggctaagcatcttcctcatgctttcagtaaattggaaaacccacggagggtttctatcttactaaaggatatttcagaaaatctatattcactgaggaggatgataattgggtctactaacattgagactgaactgaggcccagcaataatttaaacttattatcctttgaagattcaactactgggggagtacaacagaaacaaattagagaacatgaagttttaattcacgttgaagatgaaacatgggacccaacacttgatcatttagctaaacatgatggagaagatgtacttggaaataaagtggaacgaaaagaagatggatttgaagatggagtagaagacaacaaattgaaagaraatatrgaaagagcttgtttgatgtcgttagatattacagaacatgaactccaaattttggaacagcagtctcaggaagaatatcttagtgatattgcttataaatctactgagaagcatttatctcccaatgataatgaaaacgatacgtcctatgtaattgagagtgatgaagatttagaaatggagatgcttaagtctttagaaaacctcaatagtggcacggtagaaccaactcattctaaatgcttaaaaatggaaagaaatctgggtcttcctactaaagaagaagaagaagatgatgaaaatgaagctaatgaaggggaagaagatgatgataaggactttttgtggccagcacccaatgaagagcaagttacttgcctcaagatgtactttggccattccagttttaaaccagttcagtggaaagtgattcattcagtattagaagaaagaagagataatgttgctgtcatggcaactggatatggaaagagtttgtgcttccagtatccacctgtttatgtaggcaagattggccttgttatctctccccttatttctctgatggaagaccaagtgctacagcttaaaatgtccaacatcccagcttgcttccttggatcagcacagtcagaaaatgttctaacagatattaaattaggtaaataccggattgtatacgtaactccagaatactgttcaggtaacatgggcctgctccagcaacttgaggctgatattggtatcacgctcattgctgtggatgaggctcactgtatttctgagtgggggcatgattttagggattcattcaggaagttgggctccctaaagacagcactgccaatggttccaatcgttgcacttactgctactgcaagttcttcaatccgggaagacattgtacgttgcttaaatctgagaaatcctcagatcacctgtactggttttgatcgaccaaacctgtatttagaagttaggcgaaaaacagggaatatcctkcaggatctgcagccatttcttgtcaaaacaagttcccactgggaatttgaaggtccaacaatcatctactgtccttctagaaaaatgacacaacaagttacaggtgaacttaggaaactkaatctatcctgtggaacataccatgcgggcatgagttttagcacaaggaaagacattcatcataggtttgtaagagatgaaattcagtgtgtcatagctaccatagcttttggaatgggcattaataaagctgacattcgccaagtcattcattacggtgctcctaaggacatggaatcatattatcaggagattggtagagctggtcgtgatggacttcaaagttcttgtcacgtcctctgggctcctgcagacattaacttaaataggcaccttcttactgagatacgtaatgagaagtttcgattatacaaattaaagatgatggcaaagatggaaaaatatcttcattctagcagatgtaggagacaaatcatcttgtctcattttgaggacaaacaagtacaaaaagcctccttgggaattatgggaactgaaaaatgctgtgataattgcaggtccagattggatcattgctattccatggatgactcagaggatacatcctgggactttggtccacaagcatttaagcttttgtctgctgtggacatcttaggcgaaaaatttggaattgggcttccaattttatttctccgaggatctaattctcagcgtcttgccgatcaatatcgcaggcacagtttatttggcactggcaaggatcaaacagagagttggtggaaggctttttcccgtcagctgatcactgagggattcttggtagaagtttctcggtataacaaatttatgaagatttgcgcccttacgaaaaagggtagaaattggcttcataaagctaatacagaatctcagagcctcatccttcaagctaatgaagaattgtgtccaaagaagttkcttctgcctagttygaaaactgtatcttcgggcaccaaagagcattgttataatcaagtaccagttgaattaagtacagagaagaagtctaacttggagaagttatattcttataaaccatgtgataagatttcttctgggagtaacatttctaaaaaaagtatcatggtacagtcaccagaaaaagcttacagttcctcacagcctgttatttcggcacaagagcaggagactcagattgtgttatatggcaaattggtagaagctaggcagaaacatgccaataaaatggatgttcccccagctattctggcaacaaacaagatactggtggatatggccaaaatgagaccaactacggttgaaaacgtaaaaaggattgatggtgtttctgaaggcaaagctgccatgttggcccctctgttggaagtcatcaaacatttctgccaaacaaatagtgttcagacagacctcttttcaagtacaaaacctcaagaagaacagaagacgagtctggtagcaaaaaataaaatatgcacactttcacagtctatggccatcacatactctttattccaagaaaagaagatgcctttgaagagcatagctgagagcaggattctgcctctcatgacaattggcatgcacttatcccaagcggtgaaagctggctgcccccttgatttggagcgagcaggcctgactccagaggttcagaagattattgctgatgttatccgaaaccctcccgtcaactcagatatgagtaaaattagcctaatcagaatgttagttcctgaaaacattgacacgtaccttatccacatggcaattgagatccttaaacatggtcctgacagyggacttcaaccttcaygtgatgtcaacaaaaggagatgttttcccggttctgaagagatctgttcaagttctaagagaagcaaggaagaagtaggcatcaatactgagacttcatctgcagagagaaagagacgattacctgtgtggtttgccaaaggaagtgataccagcaagaaattaatggacaaaacgaaaasgggaggtctttttagttaagctggcaattaccagaacaattatgtttcttgctgtattataagaggatagctatattttatttctgaagagtaaggagtagtattttggcttaaaaatcattctaattacaaagttcactgtttattgaagaactggcatcttaaatcagccttccgcaattcatgtagtttctgggtcttctgggagcctacgtgagtacatcacctaacagaatattaaattagacttcctgtaagattgctttaagaaactgttactgtcctgttttctaatctctttattaaaacagtgtatttggaaaatgttatgtgctctgatttgatatagataacagattagtagttacatggtaattatgtgatataaaatattcatatattatcaaaattctgttttgtaaatgtaagaaagcatagttattttacaaattgtttttactgtcttttgaagaagttcttaaatacgttgttaaatggtattagttgaccagggcagtgaaaatgaaaccgcattttgggtgccattaaatagggaaaaaacatgtaaaaaatgtaaaatggagaccaattgcactaggcaagtgtatattttgtattttatatacaatttctattatttttcaagtaataaaacaatgtttttcatactgaatattatatatatattttttagctttcatttacttaattattttaagtacctttatttttccaggatgtcagaatttgattctaatctctcttatgtagcacatgtgacttaatttaaaacctatactgtgacacagagttgggtaaacgatgattatttaactttaagcagttcaccatccatttcaaagcctttgattggcttttttgtaaataaaaataacttgttaagaaacaaatatatctgtcatagaagaactagaaaatccagggaagtgagaaaaatgaaaataaaaatcattcatagttttactagtagctaatcacagtcaacctcttttgtgtatcccaccagacttttttatattcatttgtttttagktaaaatataaaagtctcgtatattcccatttttctgcattgcattachagaaggtagtggcgcctattaaatatgtgatatgttgttgtccagccatggcttctgcatttgcatgcttttgtgtgtgcatctgcaataccctgtgaatatcctgtgtgatggagtggcaagtacgcacagacacgtctgctgcatgcctaggtacgaggctgtctccaggagaagcacttgtttgattatttgagttgccaattgaatttgctgctttttttcatggcttgccattttcactgaaaagaatgactaatgaaaaacgatgattggttattagatttggatgtttggcagacattttctcaaaattgaactaagttggcctcttcacgg

SEQ ID NO: 17 - DNA, 6521 bp, Homo sapiens
cagccgcccctcctgcggccgctgcgggggccgccgcctgacttcggacaccggccccgcacccgccaggaggggagggaaggggaggcggggagagcgacggcggggggcgggcggtggaccccgcctcccccggcacagcctgctgaggggaagagggggtctccgctcttcctcagtgcactctctgactgaagcccggcgcgtggggtgcagcgggagtgcgaggggactggacaggtgggaagatgggaatgaggaccgggcggcgggaatgttctcacttctccggattccaccgggatgcaggactctagctgcccagccgcacctgcgaagagactacacttcccgaggtgctcagcggcagcgagggcctccacgcatgcgcaccgcggcgcgctgggcggggctggatgggctgtggtgggagggttgcagcgccgcgagaaaggcgagccgggccgggggcggggaaaggggtggggcaggaacgggggcggggacggcgctggaggggcgggtcgggtaggtctcccggagctgatgtgtactgtgtgcgccggggaggcgccggcttgtactcggcagcgcgggaataaagtttgctgatttggtgtctagcctggatgcctgggttgcaggccctgcttgtggtggcgctccacagtcatccggctgaagaagacctgttggactggatcttctcgggttttctttcagatattgttttgtatttacccatgaagacattgtttttyggactctgcaaataggacatttcaaagatgagtgaaaaaaaattggaaacaactgcacagcagcggaaatgtcctgaatggatgaatgtgcagaataaaagatgtgctgtagaagaaagaarggcatgtgttcrgaagagtgtttttgaagatgacctccccttcttagaattcactggatccattgtgtatagttacgatgctagtgattgctctttcctgtcagaagatattagcatgagtctatcagatggggatgtggtgggatttgacatggagtggccaccattatacaatagagggaaacttggcaaagttgcactaattcagttgtgtgtttctgagagcaaatgttacttgttccacrtttcttccatgtcagtttttccccagggattaaaaatgttgcttgaaaataaagcagttaaaaaggcaggtgtaggaattgaaggagatcagtggaaacttctacgtgactttgatatcaaattgaagaattttgtggagttgacagatgttgccaataaaaagctgaaatgyacagagacctggagccttaacagtctggttaaacacctcttaggtaaacagctcctgaaagacaagtctatccgctgtagcaattggagtaaatttcctctcactgaggaccagaaactgtatgcagccactgatgcttatgctggttttattatttaccgaaatttagagattttggatgatactgtgcaaaggtttgctataaataaagaggaagaaatcctacttagcgacatgaacaaacagttgacttcaatctctgaggaagtgatggatctggctaagcatcttcctcatgctttcagtaaattggaaaacccacggagggtttctatcttactaaaggatatttcagaaaatctatattcactgaggaggatgataattgggtctactaacattgagactgaactgaggcccagcaataatttaaacttattatcctttgaagattcaactactgggggagtacaacagaaacaaattagagaacatgaagttttaattcacgttgaagatgaaacatgggacccaacacttgatcatttagctaaacatgatggagaagatgtacttggaaataaagtggaacgaaaagaagatggatttgaagatggagtagaagacaacaaattgaaagaraatatrgaaagagcttgtttgatgtcgttagatattacagaacatgaactccaaattttggaacagcagtctcaggaagaatatcttagtgatattgcttataaatctactgagcatttatctcccaatgataatgaaaacgatacgtcctatgtaattgagagtgatgaagatttagaaatggagatgcttaaggtatgccctgttaataatagtccttttgtgtttggtgaaaaagatacgacactgtcagtggttttgcttttaagatttcttttaaactttcagtctttagaaaacctcaatagtggcacggtagaaccaactcattctaaatgcttaaaaatggaaagaaatctgggtcttcctactaaagaagaagaagaagatgatgaaaatgaagctaatgaaggggaagaagatgatgataaggactttttgtggccagcacccaatgaagagcaagttacttgcctcaagatgtactttggccattccagttttaaaccagttcagtggaaagtgattcattcagtattagaagaaagaagagataatgttgctgtcatggcaactggatatggaaagagtttgtgcttccagtatccacctgtttatgtaggcaagattggccttgttatctctccccttatttctctgatggaagaccaagtgctacagcttaaaatgtccaacatcccagcttgcttccttggatcagcacagtcagaaaatgttctaacagatattaaattaggtaaataccggattgtatacgtaactccagaatactgttcaggtaacatgggcctgctccagcaacttgaggctgatattggtatcacgctcattgctgtggatgaggctcactgtatttctgagtgggggcatgattttagggattcattcaggaagttgggctccctaaagacagcactgccaatggttccaatcgttgcacttactgctactgcaagttcttcaatccgggaagacattgtacgttgcttaaatctgagaaatcctcagatcacctgtactggttttgatcgaccaaacctgtatttagaagttaggcgaaaaacagggaatatcctkcaggatctgcagccatttcttgtcaaaacaagttcccactgggaatttgaaggtccaacaatcatctactgtccttctagaaaaatgacacaacaagttacaggtgaacttaggaaactkaatctatcctgtggaacataccatgcgggcatgagttttagcacaaggaaagacattcatcataggtttgtaagagatgaaattcagtgtgtcatagctaccatagcttttggaatgggcattaataaagctgacattcgccaagtcattcattacggtgctcctaaggacatggaatcatattatcaggagattggtagagctggtcgtgatggacttcaaagttcttgtcacgtcctctgggctcctgcagacattaacttaaataggcaccttcttactgagatacgtaatgagaagtttcgattatacaaattaaagatgatggcaaagatggaaaaatatcttcattctagcagatgtaggagacaaatcatcttgtctcattttgaggacaaacaagtacaaaaagcctccttgggaattatgggaactgaaaaatgctgtgataattgcaggtccagattggatcattgctattccatggatgactcagaggatacatcctgggactttggtccacaagcatttaagcttttgtctgctgtggacatcttaggcgaaaaatttggaattgggcttccaattttatttctccgaggatctaattctcagcgtcttgccgatcaatatcgcaggcacagtttatttggcactggcaaggatcaaacagagagttggtggaaggctttttcccgtcagctgatcactgagggattcttggtagaagtttctcggtataacaaatttatgaagatttgcgcccttacgaaaaagggtagaaattggcttcataaagctaatacagaatctcagagcctcatccttcaagctaatgaagaattgtgtccaaagaagttkcttctgcctagttygaaaactgtatcttcgggcaccaaagagcattgttataatcaagtaccagttgaattaagtacagagaagaagtctaacttggagaagttatattcttataaaccatgtgataagatttcttctgggagtaacatttctaaaaaaagtatcatggtacagtcaccagaaaaagcttacagttcctcacagcctgttatttcggcacaagagcaggagactcagattgtgttatatggcaaattggtagaagctaggcagaaacatgccaataaaatggatgttcccccagctattctggcaacaaacaagatactggtggatatggccaaaatgagaccaactacggttgaaaacgtaaaaaggattgatggtgtttctgaaggcaaagctgccatgttggcccctctgttggaagtcatcaaacatttctgccaaacaaatagtgttcagacagacctcttttcaagtacaaaacctcaagaagaacagaagacgagtctggtagcaaaaaataaaatatgcacactttcacagtctatggccatcacatactctttattccaagaaaagaagatgcctttgaagagcatagctgagagcaggattctgcctctcatgacaattggcatgcacttatcccaagcggtgaaagctggctgcccccttgatttggagcgagcaggcctgactccagaggttcagaagattattgctgatgttatccgaaaccctcccgtcaactcagatatgagtaaaattagcctaatcagaatgttagttcctgaaaacattgacacgtaccttatccacatggcaattgagatccttaaacatggtcctgacagyggacttcaaccttcaygtgatgtcaacaaaaggagatgttttcccggttctgaagagatctgttcaagttctaagagaagcaaggaagaagtaggcatcaatactgagacttcatctgcagagagaaagagacgattacctgtgtggtttgccaaaggaagtgataccagcaagaaattaatggacaaaacgaaaasgggaggtctttttagttaagctggcaattaccagaacaattatgtttcttgctgtattataagaggatagctatattttatttctgaagagtaaggagtagtattttggcttaaaaatcattctaattacaaagttcactgtttattgaagaactggcatcttaaatcagccttccgcaattcatgtagtttctgggtcttctgggagcctacgtgagtacatcacctaacagaatattaaattagacttcctgtaagattgctttaagaaactgttactgtcctgttttctaatctctttattaaaacagtgtatttggaaaatgttatgtgctctgatttgatatagataacagattagtagttacatggtaattatgtgatataaaatattcatatattatcaaaattctgttttgtaaatgtaagaaagcatagttattttacaaattgtttttactgtcttttgaagaagttcttaaatacgttgttaaatggtattagttgaccagggcagtgaaaatgaaaccgcattttgggtgccattaaatagggaaaaaacatgtaaaaaatgtaaaatggagaccaattgcactaggcaagtgtatattttgtattttatatacaatttctattatttttcaagtaataaaacaatgtttttcatactgaatattatatatatattttttagctttcatttacttaattattttaagtacctttatttttccaggatgtcagaatttgattctaatctctcttatgtagcacatgtgacttaatttaaaacctatactgtgacacagagttgggtaaacgatgattatttaactttaagcagttcaccatccatttcaaagcctttgattggcttttttgtaaataaaaataacttgttaagaaacaaatatatctgtcatagaagaactagaaaatccagggaagtgagaaaaatgaaaataaaaatcattcatagttttactagtagctaatcacagtcaacctcttttgtgtatcccaccagacttttttatattcatttgtttttagktaaaatataaaagtctcgtatattcccatttttctgcattgcattachagaaggtagtggcgcctattaaatatgtgatatgttgttgtccagccatggcttctgcatttgcatgcttttgtgtgtgcatctgcaataccctgtgaatatcctgtgtgatggagtggcaagtacgcacagacacgtctgctgcatgcctaggtacgaggctgtctccaggagaagcacttgtttgattatttgagttgccaattgaatttgctgctttttttcatggcttgccattttcactgaaaagaatgactaatgaaaaacgatgattggttattagatttggatgtttggcagacattttctcaaaattgaactaagttggcctcttcacgg

SEQ ID NO: 18 - DNA, 5765 bp, Homo sapiens
cagccgcccctcctgcggccgctgcgggggccgccgcctgacttcggacaccggccccgcacccgccaggaggggagggaaggggaggcggggagagcgacggcggggggcgggcggtggaccccgcctcccccggcacagcctgctgaggggaagagggggtctccgctcttcctcagtgcactctctgactgaagcccggcgcgtggggtgcagcgggagtgcgaggggactggacaggtgggaagatgggaatgaggaccgggcggcgggaatgttctcacttctccggattccaccgggatgcaggactctagctgcccagccgcacctgcgaagagactacacttcccgaggtgctcagcggcagcgagggcctccacgcatgcgcaccgcggcgcgctgggcggggctggatgggctgtggtgggagggttgcagcgccgcgagaaaggcgagccgggccgggggcggggaaaggggtggggcaggaacgggggcggggacggcgctggaggggcgggtcgggtaggtctcccggagctgatgtgtactgtgtgcgccggggaggcgccggcttgtactcggcagcgcgggaataaagtttgctgatttggtgtctagcctggatgcctgggttgcaggccctgcttgtggtggcgctccacagtcatccggctgaagaagacctgttggactggatcttctcgggttttctttcagatattgttttgtatttacccatgaagacattgtttttyggactctgcaaataggacatttcaaagatgagtgaaaaaaaattggaaacaactgcacagcagcggaaatgtcctgaatggatgaatgtgcagaataaaagatgtgctgtagaagaaagaarggcatgtgttcrgaagagtgtttttgaagatgacctccccttcttagaattcactggatccattgtgtatagttacgatgctagtgattgctctttcctgtcagaagatattagcatgagtctatcagatggggatgtggtgggatttgacatggagtggccaccattatacaatagagggaaacttggcaaagttgcactaattcagttgtgtgtttctgagagcaaatgttacttgttccacrtttcttccatgtcagtttttccccagggattaaaaatgttgcttgaaaataaagcagttaaaaaggcaggtgtaggaattgaaggagatcagtggaaacttctacgtgactttgatatcaaattgaagaattttgtggagttgacagatgttgccaataaaaagctgaaatgyacagagacctggagccttaacagtctggttaaacacctcttaggtaaacagctcctgaaagacaagtctatccgctgtagcaattggagtaaatttcctctcactgaggaccagaaactgtatgcagccactgatgcttatgctggttttattatttaccgaaatttagagattttggatgatactgtgcaaaggtttgctataaataaagaggaagaaatcctacttagcgacatgaacaaacagttgacttcaatctctgaggaagtgatggatctggctaagcatcttcctcatgctttcagtaaattggaaaacccacggagggtttctatcttactaaaggatatttcagaaaatctatattcactgaggaggatgataattgggtctactaacattgagactgaactgaggcccagcaataatttaaacttattatcctttgaagattcaactactgggggagtacaacagaaacaaattagagaacatgaagttttaattcacgttgaagatgaaacatgggacccaacacttgatcatttagctaaacatgatggagaagatgtacttggaaataaagtggaacgaaaagaagatggatttgaagatggagtagaagacaacaaattgaaagaraatatrgaaagagcttgtttgatgtcgttagatattacagaacatgaactccaaattttggaacagcagtctcaggaagaatatcttagtgatattgcttataaatctactgagcatttatctcccaatgataatgaaaacgatacgtcctatgtaattgagagtgatgaagatttagaaatggagatgcttaagcatttatctcccaatgataatgaaaacgatacgtcctatgtaattgagagtgatgaagatttagaaatggagatgcttaagtctttagaaaacctcaatagtggcacggtagaaccaactcattctaaatgcttaaaaatggaaagaaatctgggtcttcctactaaagaagaagaagaagatgatgaaaatgaagctaatgaaggggaagaagatgatgataaggactttttgtggccagcacccaatgaagagcaagttacttgcctcaagatgtactttggccattccagttttaaaccagttcagtggaaagtgattcattcagtattagaagaaagaagagataatgttgctgtcatggcaactggatatggaaagagtttgtgcttccagtatccacctgtttatgtaggcaagattggccttgttatctctccccttatttctctgatggaagaccaagtgctacagcttaaaatgtccaacatcccagcttgcttccttggatcagcacagtcagaaaatgttctaacagatattaaattaggtaaataccggattgtatacgtaactccagaatactgttcaggtaacatgggcctgctccagcaacttgaggctgatattggtatcacgctcattgctgtggatgaggctcactgtatttctgagtgggggcatgattttagggattcattcaggaagttgggctccctaaagacagcactgccaatggttccaatcgttgcacttactgctactgcaagttcttcaatccgggaagacattgtacgttgcttaaatctgagaaatcctcagatcacctgtactggttttgatcgaccaaacctgtatttagaagttaggcgaaaaacagggaatatcctkcaggatctgcagccatttcttgtcaaaacaagttcccactgggaatttgaaggtccaacaatcatctactgtccttctagaaaaatgacacaacaagttacaggtgaacttaggaaactkaatctatcctgtggaacataccatgcgggcatgagttttagcacaaggaaagacattcatcataggtttgtaagagatgaaattcagtgtgtcatagctaccatagcttttggaatgggcattaataaagctgacattcgccaagtcattcattacggtgctcctaaggacatggaatcatattatcaggagattggtagagctggtcgtgatggacttcaaagttcttgtcacgtcctctgggctcctgcagacattaacttaaataggcaccttcttactgagatacgtaatgagaagtttcgattatacaaattaaagatgatggcaaagatggaaaaatatcttcattctagcagatgtaggagacaaatcatcttgtctcattttgaggacaaacaagtacaaaaagcctccttgggaattatgggaactgaaaaatgctgtgataattgcaggtccagattggatcattgctattccatggatgactcagaggatacatcctgggactttggtccacaagcatttaagcttttgtctgctgtggacatcttaggcgaaaaatttggaattgggcttccaattttatttctccgaggatctaattctcagcgtcttgccgatcaatatcgcaggcacagtttatttggcactggcaaggatcaaacagagagttggtggaaggctttttcccgtcagctgatcactgagggattcttggtagaagtttctcggtataacaaatttatgaagatttgcgcccttacgaaaaagggtagaaattggcttcataaagctaatacagaatctcagagcctcatccttcaagctaatgaagaattgtgtccaaagaagttkcttctgcctagttygaaaactgtatcttcgggcaccaaagagcattgttataatcaagtaccagttgaattaagtacagagaagaagtctaacttggagaagttatattcttataaaccatgtgataagatttcttctgggagtaacatttctaaaaaaagtatcatggtacagtcaccagaaaaagcttacagttcctcacagcctgttatttcggcacaagagcaggagactcagattgtgttatatggcaaattggtagaagctaggcagaaacatgccaataaaatggatgttcccccagctattctggcaacaaacaagatactggtggatatggccaaaatgagaccaactacggttgaaaacgtaaaaaggattgatggtgtttctgaaggcaaagctgccatgttggcccctctgttggaagtcatcaaacatttctgccaaacaaatagtgttcagacagacctcttttcaagtacaaaacctcaagaagaacagaagacgagtctggtagcaaaaaataaaatatgcacactttcacagtctatggccatcacatactctttattccaagaaaagaagatgcctttgaagagcatagctgagagcaggattctgcctctcatgacaattggcatgcacttatcccaagcggtgaaagctggctgcccccttgatttggagcgagcaggcctgactccagaggttcagaagattattgctgatgttatccgaaaccctcccgtcaactcagatatgagtaaaattagcctaatcagaatgttagttcctgaaaacattgacacgtaccttatccacatggcaattgagatccttaaacatggtcctgacagyggacttcaaccttcaygtgatgtcaacaaaaggagatgttttcccggttctgaagagatctgttcaagttctaagagaagcaaggaagaagtaggcatcaatactgagacttcatctgcagagagaaagagacgattacctgtgtggtttgccaaaggaagtgataccagcaagaaattaatggacaaaacgaaaasgggaggtctttttagttaagctggcaattaccagaacaattatgtttcttgctgtattataagaggatagctatattttatttctgaagagtaaggagtagtattttggcttaaaaatcattctaattacaaagttcactgtttattgaagaactggcatcttaaatcagccttccgcaattcatgtagtttctgggtcttctgggagcctacgtgagtacatcacctaacagaatattaaattagacttcctgtaagattgctttaagaaactgttactgtcctgttttctaatctctttattaaaacagtgtatttggaaaatgttatgtgctctgatttgatatagataacagattagtagttacatggtaattatgtgatataaaatattcatatattatcaaaattctgttttgtaaatgtaagaaagcatagttattttacaaattgtttttactgtcttttgaagaagttcttaaatacgttgttaaatggtattagttgaccagggcagtgaaaatgaaaccgcattttgggtgccattaaatagggaaaaaacatgtaaaaaatgtaaaatggagaccaattgcactaggcaagtgtatattttgtattttatatacaatttctattatttttcaagtaataaaacaatgtttttcatactgaatattaaaaaaaaaaaaaaaaaaaa

SEQ ID NO: 19 - DNA, 2716 bp, Homo sapiens
gggatctgtggtgaagttaggttctatcttaactgtccctcctccatgcaagagggcatctctctccatactgtgctgcccaggcttgaaggtgagatgacaccggtaatgtgaaattgtccttcctatacacttctatgtgtcttttcttatttctgtgctgcaaccaggtggcataacctctcacctgattccttagctctagtgaagttattttcgtgcatggatacttgttcgaattgatgtttctgcaagggatgagcgctagaaactcctgttctgacaaactcctattcctattcttgctgacatcactccctgaaatagttaatatacttaacagctgaacacggataggatgttcatggaatatgttgacaggacaaaaagttgaaactgttggcagaaacccaaagtcaatattgaagccaagcaaaatattgcctgcagtgccacattagaacagcttgaagaccgttcatttttaagtgacaagagactcacctccaagaagcaattgtgttttcagaatgattttattcaagcaagcaacttatttcatttccttgtttgctacagtttcctgtggatgtctgactcaactctatgaaaacgccttcttcagaggtggggatgtagcttccatgtacaccccaaatgcccaatactgccagatgaggtgcacattccacccaaggtgtttgctattcagttttcttccagcaagttcaatcaatgacatggagaaaaggtttggttgcttcttgaaagatagtgttacaggaaccctgccaaaagtacatcgaacaggtgcagtttctggacattccttgaagcaatgtggtcatcaaataagtgcttgccatcgagacatttataaaggagttgatatgagaggagtcaattttaatgtgtctaaggttagcagtgttgaagaatgccaaaaaaggtgcaccartaacattcgctgccagtttttttcatatgccacgcaaacatttcacaaggcagagtaccggaacaattgcctattaaagtacagtcccggaggaacacctaccgctataaaggtgctgagtaacgtggaatctggattctcactgaagccctgtgccctttcagaaattggttgccamatgaacatcttccagcatcttgmgttctcagatgtggatgttgccagggttctcactccagatgcttttgtgtgtcggaccatctgcacctatcaccccaactgcctcttctttacattctatacaaatgtatggaaaatcgagtcacaaagaaatgtttgtcttcttaaaacatctgaaagtggcacaccaagttcctctactcctcaagaaaacaccatatctggatatagccttttaacctgcaaaagaactttacctgaaccctgccattctaaaatttacccgggagttgactttggaggagaagaattgaatgtgactkttgttaaaggagtgaatgtttgccaagagacttgcacaaagatgattcgctgtcagtttttcacttattctttactcccagaagactgtaaggaagagaagtgtaagtgtttcttaagattatctatggatggttctccaactaggattgcgtatgggacacaagggagctctggttactctttgagattgtgtaacactggggacaackctgtctgcacaacaaaaacaagcacacgcattgttggaggaacaaactcttcttggggagagtggccctggyaggtgagcctgcaggtgaagctgacagctcagaggcacctgtgtggagggtcactcataggacaccagtgggtcctcactgctgcccactgctttgatgggcttcccctgcaggatgtttggcgcatctatagtggcattttaaatctgtcagacattacaaaagatacacctttctcacaaataaaagagattattattcaccaaaactataaagtctcagaagggaatcatgatatcgccttgataaaactccaggctcctttgaattacactgaattccaaaaaccaatatgcctaccttccaaaggtgacacaagcacaatttataccaactgttgggtaaccggatggggcttctcgaaggagaaaggtgaaatccaaaatattctacaaaaggtaaatattcctttggtaacaaatgaagaatgccagaaaagatatcaagattataaaataacccaacrgatggtctgtgctggctataaagaagggggaaaagatgcttgtaagggagattcaggtggtcccttagtttgcaaacacaayggaatgtggcgtttggtgggcatcaccagctggggtgaaggctgtgcccgcagggagcaacctggtgtctacaccaaagtcgctgagtacatggactggattttagagamaacacagagcagtgatggaaaagctcagatgcagtcaccagcatgagaagcagtccagagtctaggcaatttttacaacctgagttcaagtcaaattctgagcctggggggtcctcatctgcaaagcatggagagtggcatcttctttgcatcctaaggacgaaaracacagtgcactcagagctgctgaggacaatgtctggctgaagcccgctttcagcacgccgtaaccaggggctgacaatgcgaggtcgcaactgagatctccatgactgtgtgttgtgaaataaaatggtgaaagatcacgattagcaa

SEQ ID NO: 20 - DNA, 2707 bp, Homo sapiens
gggatctgtggtgaagttaggttctatcttaactgtccctcctccatgcaagagggcatctctctccatactgtgctgcccaggcttgaaggtgagatgacaccggtaatgtgaaattgtccttcctatacacttctatgtgtcttttcttatttctgtgctgcaaccaggtggcataacctctcacctgattccttagctctagtgaagttattttcgtgcatggatacttgttcgaattgatgtttctgcaagggatgagcgctagaaactcctgttctgacaaactcctattcctattcttgctgacatcactccctgaaatagttaatatacttaacagctgaacacggataggatgttcatggaatatgttgacaggacaaaaagttgaaactgttggcagaaacccaaagtcaatattgaagccaagcaaaatattgcctgcagtgccacattagaacagcttgaagaccgttcatttttaagtgacaagagactcacctccaagaagcaattgtgttttcagaatgattttattcaagcaagcaacttatttcatttccttgtttgctacagtttcctgtggatgtctgactcaactctatgaaaacgccttcttcagaggtggggatgtagcttccatgtacaccccaaatgcccaatactgccagatgaggtgcacattccacccaaggtgtttgctattcagttttcttccagcaagttcaatcaatgacatggagaaaaggtttggttgcttcttgaaagatagtgttacaggaaccctgccaaaagtacatcgaacaggtgcagtttctggacattccttgaagcaatgtggtcatcaaataagtgcttgccatcgagacatttataaaggagttgatatgagaggagtcaattttaatgtgtctaaggttagcagtgttgaagaatgccaaaaaaggtgcaccartaacattcgctgccagtttttttcatatgccacgcaaacatttcacaaggcagagtaccggaacaattgcctattaaagtacagtcccggaggaacacctaccgctataaaggtgctgagtaacgtggaatctggattctcactgaagccctgtgccctttcagaaattggttgccamatgaacatcttccagcatcttgmgttctcagatgtggatgttgccagggttctcactccagatgcttttgtgtgtcggaccatctgcacctatcaccccaactgcctcttctttacattctatacaaatgtatggaaaatcgaaaatgtttgtcttcttaaaacatctgaaagtggcacaccaagttcctctactcctcaagaaaacaccatatctggatatagccttttaacctgcaaaagaactttacctgaaccctgccattctaaaatttacccgggagttgactttggaggagaagaattgaatgtgactkttgttaaaggagtgaatgtttgccaagagacttgcacaaagatgattcgctgtcagtttttcacttattctttactcccagaagactgtaaggaagagaagtgtaagtgtttcttaagattatctatggatggttctccaactaggattgcgtatgggacacaagggagctctggttactctttgagattgtgtaacactggggacaackctgtctgcacaacaaaaacaagcacacgcattgttggaggaacaaactcttcttggggagagtggccctggyaggtgagcctgcaggtgaagctgacagctcagaggcacctgtgtggagggtcactcataggacaccagtgggtcctcactgctgcccactgctttgatgggcttcccctgcaggatgtttggcgcatctatagtggcattttaaatctgtcagacattacaaaagatacacctttctcacaaataaaagagattattattcaccaaaactataaagtctcagaagggaatcatgatatcgccttgataaaactccaggctcctttgaattacactgaattccaaaaaccaatatgcctaccttccaaaggtgacacaagcacaatttataccaactgttgggtaaccggatggggcttctcgaaggagaaaggtgaaatccaaaatattctacaaaaggtaaatattcctttggtaacaaatgaagaatgccagaaaagatatcaagattataaaataacccaacrgatggtctgtgctggctataaagaagggggaaaagatgcttgtaagggagattcaggtggtcccttagtttgcaaacacaayggaatgtggcgtttggtgggcatcaccagctggggtgaaggctgtgcccgcagggagcaacctggtgtctacaccaaagtcgctgagtacatggactggattttagagamaacacagagcagtgatggaaaagctcagatgcagtcaccagcatgagaagcagtccagagtctaggcaatttttacaacctgagttcaagtcaaattctgagcctggggggtcctcatctgcaaagcatggagagtggcatcttctttgcatcctaaggacgaaaracacagtgcactcagagctgctgaggacaatgtctggctgaagcccgctttcagcacgccgtaaccaggggctgacaatgcgaggtcgcaactgagatctccatgactgtgtgttgtgaaataaaatggtgaaagatcacgattagcaa

SEQ ID NO: 21 - DNA, 615 bp, Homo sapiens
aggcctgcagtctgcagccctcttgggacccgagggcaccactccctgttggaacagaagagtcagttctggcatcagcagtatcactctgtagctgggtccaggcagaggggacatgggccaggaggatttattccaggctgtaagatgcccaagtgcagggcagctggagaagcccatgccragagagcaggcagtgcccacagtcctcctttacagggtgtctactggatctcatgtcaaagcaccaagatgccaggtggcttgatgatgcctggggagccaccatggcactcaaggggaaagggtctcactccacggggagacctggagagggacatcccctatccaaccccttctgccagactttgcacctctggctccagggagctcacaggcaggggctggtccagcccagaggcgatgaagacagtgacgatgatgatggtggtggagatgcaggcgctgactcagctgtctctctgtgactgtctttgtgacagtctcattgttgttgttactaagatggcttccctcagaggacggacacttggagtagtggcaggttcggccacccctagagacgatggcggtggggaccggggcagccccctg

SEQ ID NO: 22 - DNA, 589 bp, Homo sapiens
gaagaagtggggtgacttaggggctgagcctcagcaactgggagagtttataagctgggatagcagacccctcagcaccacccattctcctcatccctctgctmtctggcctccagcctcccagcagcatggctttcaccggcaagttcgagatggagagtgagaagaattatgatgagttcatgaagctccttgggatctccagcgatgtaatcgaaaaggcccgcaacttcaagatcgtcacggaggtgcagcaggatgggcaggacttcacttggtcccagcactactccgggggccacaccatgaccaacaagttcactgttggcaaggaaagcaacatacagacaatggggggcaagatgttcaaggccactgtgcagatggagggcgggaagctggtggtgaatttccccaactatcaccagacctcagagatcgtgggtgacaagctggtggaggtctccaccatcggaggcgtgacctatgagcgcgtgagcaagagactggcctaagcagccaggcccggcccagggagctacaaacccaccaataaaactgatataaggacagatgctgcttgctccag

SEQ ID NO: 23 - DNA, 2413 bp, Homo sapiens
ggcctccctccacctgtcttctcagagcagrtaatggcaagcatggctgccgtgctcacctgggctctggctcttctttcagcgttttsggccacccaggcacggaaaggcttctgggactacttcagccagaccagcggggamaaaggcagggtggagcagatmcatcagcagaagatggctcgcgagcccgcgtgagtgcccaggggaaggggtgtaggcgaagggaggagacagctgggccatgccatgatgacctgcctctgctgcctcaacctctgtggccgctgctgggacagaggaaaggagcggtgctagctctgtctgcagatcccggccatcctgggctctttagcgccctctgcctgcagcccccgccttgacaactccgtagctgttgcccccttgctcactgaggcgcgggacctgggatcaatcgggaggacgcccgctgcagtccccagaatcaaaggatgatgtggcgcatctatgtttctttggagagtgttgtaggtctggatttgtatggscaatgtgtttgtgcttcgtgcgtgagttgttactggccagggctaggacaagagccctcgaccctggggccaacgccctgcgtccttggttcccccagaggatcagtgcgcgatgacttggggacaaaggagatgatggrggctagcagtctgacggcctggatatctgtccccttctccaggaccctgaaagacagccttgagcaagacctcaacaatatgaacaagttcctggaaaagctgaggcctctgagtgggagcgaggctcctcggctcccacaggacccggtgggcatgcggcggcagctgcaggaggagttggaggaggtgaaggctcgcctccagccctacatggcagaggcgcacgagctggtgggctggaatttggagggcttgcggcagcaactgaagccctacacgatggatctgatggagcaggtggccctgcgcgtgcaggagctgcaggagcagttgcgcrtggtgggggaagacaccaaggcccagttgctggggggcgtggacgaggcttgggctttgctgcagggactgcagagccgcgtggtgcaccacacckgccgcttcaaagagctcttccacccatacgccgagagcctggtgagcggcatcgggcgccacgtgcaggagctgcaccgcagtgtggctccgcacgcccccgccagccccgcgcgcctcagtcgctgcgtgcaggtgctctcccggaagctcacgctcaaggccaaggccctgcacgcacgcatccagcagaacctggaccagctgcgcgaagagctcagcagagcctttgcaggcactgggactgaggaaggggccggcccggacccccagatgctctccgaggaggtgcgccagcgacttcaggctttccgccaggacayctacctgcagatagctgccttcactcgcgccatcgaccaggagactgaggaggtccagcagcagctggcgccacctccaccaggccacagtgccttcgccccagagtttcaacaaacagacagtrgcaaggttctgagcaagctgcaggcccgtctggatgacctgtgggaagacatcactcacagccttcatgaccagggccacagccatctgggggacccctgaggatctacctgcccaggcccattcccagctycttgtctggggagccttggctctgagcmtctagcatggttcagtccttgaaagtggcctgttgggtggagggtggaaggtcctgtgcaggacagggaggccaccaaaggggctgctgtctcctgcayatccagcctcctgygactccccaatctggatgcattacattcaccaggctttgcaaacccagcctcccagtgctcatttgggaatgctcatgagttactccattcaagggtgagggagtagggagggagaggcaccatgcatgtgggtgattatctgcaagcctgtttgccgtgatgctggaagcctgtgccactacatcctggagtttggctctagtcacttctggctgcctggyggccactgctacagctggtccacagagaggagcacttgtctccccagggctgccatggcagctatcaggggaatagaagggagaaagagaatatcatggggagaacatgtgatggtgtgtgaatatccctgctggctctgatgctggtgggtacgaaaggtgtgggctgtgataggagagggcagagcccatgtttcctgacatagctctacacctaaataagggactgaaccctcccaactgtgggagctccttaaaccctctggggagcatactgtgtgctctccccatctccagcccctccctctgggttcccaagttgaagcctagacttctggctcaaatgaaatagatgtttatgatagaa

SEQ ID NO: 24 - DNA, 1895 bp, Homo sapiens
ggcctccctccacctgtcttctcagagcagrtaatggcaagcatggctgccgtgctcacctgggctctggctcttctttcagcgttttsggccacccaggcacggaaaggcttctgggactacttcagccagaccagcggggamaaaggcagggtggagcagatmcatcagcagaagatggctcgcgagcccgcgaccctgaaagacagccttgagcaagacctcaacaatatgaacaagttcctggaaaagctgaggcctctgagtgggagcgaggctcctcggctcccacaggacccggtgggcatgcggcggcagctgcaggaggagttggaggaggtgaaggctcgcctccagccctacatggcagaggcgcacgagctggtgggctggaatttggagggcttgcggcagcaactgaagccctacacgatggatctgatggagcaggtggccctgcgcgtgcaggagctgcaggagcagttgcgcrtggtgggggaagacaccaaggcccagttgctggggggcgtggacgaggcttgggctttgctgcagggactgcagagccgcgtggtgcaccacacckgccgcttcaaagagctcttccacccatacgccgagagcctggtgagcggcatcgggcgccacgtgcaggagctgcaccgcagtgtggctccgcacgcccccgccagccccgcgcgcctcagtcgctgcgtgcaggtgctctcccggaagctcacgctcaaggccaaggccctgcacgcacgcatccagcagaacctggaccagctgcgcgaagagctcagcagagcctttgcaggcactgggactgaggaaggggccggcccggacccccagatgctctccgaggaggtgcgccagcgacttcaggctttccgccaggacayctacctgcagatagctgccttcactcgcgccatcgaccaggagactgaggaggtccagcagcagctggcgccacctccaccaggccacagtgccttcgccccagagtttcaacaaacagacagtrgcaaggttctgagcaagctgcaggcccgtctggatgacctgtgggaagacatcactcacagccttcatgaccagggccacagccatctgggggacccctgaggatctacctgcccaggcccattcccagctycttgtctggggagccttggctctgagcmtctagcatggttcagtccttgaaagtggcctgttgggtggagggtggaaggtcctgtgcaggacagggaggccaccaaaggggctgctgtctcctgcayatccagcctcctgygactccccaatctggatgcattacattcaccaggctttgcaaacccagcctcccagtgctcatttgggaatgctcatgagttactccattcaagggtgagggagtagggagggagaggcaccatgcatgtgggtgattatctgcaagcctgtttgccgtgatgctggaagcctgtgccactacatcctggagtttggctctagtcacttctggctgcctggyggccactgctacagctggtccacagagaggagcacttgtctccccagggctgccatggcagctatcaggggaatagaagggagaaagagaatatcatggggagaacatgtgatggtgtgtgaatatccctgctggctctgatgctggtgggtacgaaaggtgtgggctgtgataggagagggcagagcccatgtttcctgacatagctctacacctaaataagggactgaaccctcccaactgtgggagctccttaaaccctctggggagcatactgtgtgctctccccatctccagcccctccctctgggttcccaagttgaagcctagacttctggctcaaatgaaatagatgtttatgatagaa

SEQ ID NO: 25 - DNA, 4371 bp, Homo sapiens
cttgcaatccaggctttccttggaagtggctgtaacatgtatgaaaagaaagaaaggaggaccaagagatgaaagagggctgcacgcgtgggggcccgagtggtgggcggggacagtcgtcttgttacaggggtgctggccttccctggcgcctgcccctgtcggccccgcccgagaacctccctgcgccagggcagggtttactcatcccggcgaggtgatcccatgcgcgagggcgggcgcaagggcggccagagaacccagcaatccgagtatgcggcatcagcccttcccaccaggcacttccttccttttcccgaacgtccagggagggagggccgggcacttataaactcgagccctggccgatccgcatgtcagaggctgcctcgcaggggctgcgcgcagcggcaagaagtgtctgggctgggacggacaggagaggctgtcgccatcggcgtcctgtgcccctctgctccggcacsgccctgtcgcagtgcccgcgctttccccggcgcctgcacgcggcgcgcctgggtaacatgcttggggtcctggtccttggcgcgctggccctggccrgcctggggttccccgcacccgcagagccgcagccgggtggcagccagtgcgtcgagcacgactgcttcgcgctctacccgggccccrcgaccttcctcaatgccagtcagatctgcgacggactgcggggccacctaatgacagtgcgctcctcggtggctgccgatgtcatttccttgctactgaacggcgacgscggcgttggccgccggcgcctctggatcggcctgcagctgccacccggctgcggcgaccccaagcgcctcgggcccctgcgcggcttccagtgggttacgggagacaacaacaccagctatagcaggtgggcacggctcgacctcaatggggctcccctctgcggcccgttgtgcgtcgctgtctccgctgctgaggccactgtgcccagcgagccgatctgggaggagcagcagtgcgaagtgaagsccgatggcttcctctgcgagttccacttcccagccacctgcaggccactggctgtggagcccggcgccgcggctgccgccgtctcgatcacctacggcaccccgttcgcggcccgcggagcggacttccaggcgctgccggtgggcagctccgccgcggtggctcccctcggcttacagctaatgtgcaccgcgccgcccggagcggtccaggggcactgggccagggaggcgccgggcgcttgggactgcagcgtggagaacggcggctgcgagcacgcgtgcaatgcgatccctggggctccccgctgccagtgcccagccggcgccgccctgcaggcagacgggcgctcctgcaccgcatccgcgacgcagtcctgcaacgacctctgcgagcacttctgcgttcccaaccccgaccagccgggctcctactcgtgcatgtgcgagaccggctaccggctggcggccgaccaacaccggtgcgaggacgtggatgactgcatactggagcccagtccgtgtccgcagcgctgtgtcaacacacagggtggcttcgagtgccactgctaccctaactacgacctggtggacggcgagtgtgtggagcccgtggacccgtgcttcagagccaactgcgagtaccagtgccagcccctgaaccaaactagctacctctgcgtctgcgccgagggcttcgcgcccattccccacgagccgcacargtgccagatgttttgcaaccagactgcctgtccagccgactgcgaccccaacacccaggctagctgtgagtgccctgaaggctacatcctggacgacggtttcatctgcacggacatcgacgagtgcgaaaacggcggcttctgctccggggtgtgccacaacctccccggtaccttcgagtgcatctgcgggcccgactcggcccttgyccgccacattggcaccgactgtgactccggcaaggtgkacggtggcgacagcggctctggcgagyccccgcccagcccgacgcycggctccaccttgactcctccggccgtggggctcgtgcattcgggcttgctcataggcatctccatcgcgagcctgtgcctggtggtggcgcttttggcgctcctctgccacctgcgcaagaagcagggcgccgccagggccaagatggagtacaagtgcgcggccccttccaaggaggtagtgctgcagcacgtgcggaccgagcggacgccgcagagactctgagcggcctccgtccaggagcctggctccgtccaggagcctgtgcctcctcacccccagctttgctaccaaagcaccttagctggcatkacagctggagaagaccctccccgcaccccccaagctgttttcttctattccatggctaactggcgagggggtgattagagggaggagaatgagcctcggcctcttccgtgacgtcactggaccactgggcaatgatggcaattttgtaacgaagacacagactgcgatttgtcccaggtcctcactaccrggcgcaggagggtgagcgttattggtcggcagccttctgggcagaccttgacctcgtgggctagggatgactaaaatatttattttttttaagtatttaggtttttgtttgtttcctttgttcttacctgtatgtctccagtatccactttgcacagctctccggtctctctctctctacaaactcccacttgtcatgtgacaggtaaactatcttggtgaatttttttttcctagccctctcacatttatgaagcaagccccacttattccccattcttcctagttttctcctcccaggaactgggccaactcacctgagtcaccctacctgtgcctgaccctacttcttttgctcttagctgtctgctcagacagaacccctacatgaaacagaaacaaaaacactaaaaataaaaatggccatttgctttttcaccagatttgctaatttatcctgaaatttcagattcccagagcaaaataattttaaacaaaggttgagatgtaaaaggtrttaaattgatgttgctggactgtcatagaaattacacccaaagaggtatttatctttacttttaaacagtgagcctgaattttgttgctgttttgatttgtactgaaaaatggtaattgttgctaatcttcttatgcaatttccttttttgttattattacttatttttgacagtgttgaaaatgttcagaaggttgctctagattgagagaagagacaaacacctcccaggagacagttcaagaaagcttcaaactgcatgattcatgccaattagcaattgactgtcactgttccttgtcactggtagaccaaaataaaaccagctctactggtcttgtggaattgggagcttgggaatggatcctggaggatgcccaattagggcctagccttaatcaggtcctcagagaatttctaccatttcagagaggccttttggaatgtggcccctgaacaagaattggaagctgccctgcccatgggagctggttagaaatgcagaatcctaggctccaccccatccagttcatgagaatctatatttaacaagatctgcagggggtgtgtctgctcagtaatttgaggacaaccattccagactgcttccaattttctggaatacatgaaatatagatcagttataagtagcaggccaagtcaggcccttattttcaagaaactgaggaattttctttgtgtagctttgctctttggtagaaaaggctaggtacacagctctagacactgccacacagggtctgcaaggtctttggttcagctaagctaggaatgaaatcctgcttcagtgtatggaaataaatgtatcatagaaatgtaacttttgtaagacaaaggttttcctcttctattttgtaaactcaaaatatttgtacatagttatttatttattggagataatctagaacacaggcaaaatccttgcttatgacatcacttgtacaaaatmaacaaataacaatgtgwtctcgggttgtgtgtctgttcacttttcctccctcagtgccctcattttatgtcattaaatggggctcacaaaccatgcaaatgctatgagatgcatggagggctgccctgtaccccagcacttgtgttgtctggtgrtggcaccatctctgattttcaaagctttttccagaggctattattttcactgtagaatgatttcatgctatctcygtgtgcacaaatatttattttctttctgtaaccataacaacttcatatatgaggacttgtgtctctgtgcttttaaatgcataaatgcattataggatcatttgttgg

SEQ ID NO: 26 - DNA, 2231 bp, Homo sapiens
aatctctgattgtgaagccctctttttctctccttctatttctctctagagcactcaagactttactgacgaaaactcaggaaatcctctatcacaaagaggtttggcaactaaactaagacattaaaaggaaaataccagatgccactctgcaggytgcaataactactacttactggatacattcaaaccctccagaatcaacagttatcaggtaaccaacaagaaatgcaagccgtcgacaayctcacctctgcgcctggkaacaccagtctgtgcaccagagactacaaaatcacccaggtcctcttcccactgctctacactgtcctgttttttgttggacttatcacaaatggcctggcgatgaggattttctttcaaatccggagtaaatcaaactttattatttttcttaagaacacagtcatttctgatcttctcatgattctgacttttccattcaaaattcttagtgatgccaaactgggaacaggaccactgagaacttttgtgtgtcaagttacctccgtcatattttatttcacaatgtatatcagtatttcattcctgggactgataactatcgatcgctaccagaagaccaccaggccatttaaaacatccaaccccaaaaatctcttgggggctaagattctctctgttgtcatctgggcattcatgttcttactctctttgcctaacatgattctgaccaacaggcagccgagagacaagaatgtgaagaaatgctctttccttaaatcagagttyggtctagtctggcatgaaatagtaaattacatctgtcaagtcattttctggattaatttcttaattgttattgtatgttatacactcattacaaaagaactgtaccggtcatacgtaagaacgaggggtgtaggtaaagtccccaggaaaaaggtgaacgtcaaagttttcattatcattgctgtattctttatttgttttgttcctttccattttgcccgaattccttacaccctgagccaaacccgggatgtctttgactgcactgctgaaaatactctgttctatgtgaaagagagcactctgtggttaacttccttaaatgcatgcctggatccgttcatctattttttcctttgcaagtccttcagaaattccttgataagtatgctgaagtgccccaattctgcaacatctctgtcccaggacaataggaaaaaagaacaggatggtggtgacccaaatgaagagactccaatgtaaacaaattaactaaggaaatatttcaatctctttgtgttcagaactcgttaaagcaaagcgctaagtaaaaatattaactgacgaagaagcaactaagttaataataatgactctaaagaaacagaagattacaaaagcaattttcatttacctttccagtatgaaaagctatcttaaaatatakaaaactaatctaaactgtagctgtattagcagcaaaacaaacgacatccaattgtcatgctgcatgcaaaactacacagaattcatgttttgcagagttttgccaaaatgagtaatcatataatatttactgtaatttttaaaatacattatcgttcacaattttattttttcataatcaactaaggaagaacgatcaattggatataatcttcttaccaaaaatgatagttaaaatgtatatatatcctagtcccctaaccaaatcctgacctattgggatacttataaaaatttaagtaagtgggatacacaaagaataataactattaacttttcattattagcaaaaacctaagggatttaaactaattgaaactgtatttgattggacttaattttttatgtttatttagaagataaagatttaaagaagacctttacaataaagagaagaaatatcgaagtcattaaaataaggagacttacttttatgacattctaatactaaaaaatatagaaatatttccttaattctagagaaactagttttactaattttttacaacttcaataataccatcattgacacttacctttattaattagcttctagaaaatagctgctaattaggttaatgaacattttaccttagtgaaaaaaattaattaaatatgattacaaagttgcacagcataactactgagaggaaagtgattgatctgtttgtaattacttgtttgtattggtgtgtataaaatacaaaatttacattaaactctaaatcatt

SEQ ID NO: 27 - DNA, 2247 bp, Homo sapiens
atcacaatcagaagacaggagctgcagaacagaacactttctcatgtccagggtcagattacaagagcactcaagactttactgacgaaaactcaggaaatcctctatcacaaagaggtttggcaactaaactaagacattaaaaggaaaataccagatgccactctgcaggytgcaataactactacttactggatacattcaaaccctccagaatcaacagttatcaggtaaccaacaagaaatgcaagccgtcgacaayctcacctctgcgcctggkaacaccagtctgtgcaccagagactacaaaatcacccaggtcctcttcccactgctctacactgtcctgttttttgttggacttatcacaaatggcctggcgatgaggattttctttcaaatccggagtaaatcaaactttattatttttcttaagaacacagtcatttctgatcttctcatgattctgacttttccattcaaaattcttagtgatgccaaactgggaacaggaccactgagaacttttgtgtgtcaagttacctccgtcatattttatttcacaatgtatatcagtatttcattcctgggactgataactatcgatcgctaccagaagaccaccaggccatttaaaacatccaaccccaaaaatctcttgggggctaagattctctctgttgtcatctgggcattcatgttcttactctctttgcctaacatgattctgaccaacaggcagccgagagacaagaatgtgaagaaatgctctttccttaaatcagagttyggtctagtctggcatgaaatagtaaattacatctgtcaagtcattttctggattaatttcttaattgttattgtatgttatacactcattacaaaagaactgtaccggtcatacgtaagaacgaggggtgtaggtaaagtccccaggaaaaaggtgaacgtcaaagttttcattatcattgctgtattctttatttgttttgttcctttccattttgcccgaattccttacaccctgagccaaacccgggatgtctttgactgcactgctgaaaatactctgttctatgtgaaagagagcactctgtggttaacttccttaaatgcatgcctggatccgttcatctattttttcctttgcaagtccttcagaaattccttgataagtatgctgaagtgccccaattctgcaacatctctgtcccaggacaataggaaaaaagaacaggatggtggtgacccaaatgaagagactccaatgtaaacaaattaactaaggaaatatttcaatctctttgtgttcagaactcgttaaagcaaagcgctaagtaaaaatattaactgacgaagaagcaactaagttaataataatgactctaaagaaacagaagattacaaaagcaattttcatttacctttccagtatgaaaagctatcttaaaatatakaaaactaatctaaactgtagctgtattagcagcaaaacaaacgacatccaattgtcatgctgcatgcaaaactacacagaattcatgttttgcagagttttgccaaaatgagtaatcatataatatttactgtaatttttaaaatacattatcgttcacaattttattttttcataatcaactaaggaagaacgatcaattggatataatcttcttaccaaaaatgatagttaaaatgtatatatatcctagtcccctaaccaaatcctgacctattgggatacttataaaaatttaagtaagtgggatacacaaagaataataactattaacttttcattattagcaaaaacctaagggatttaaactaattgaaactgtatttgattggacttaattttttatgtttatttagaagataaagatttaaagaagacctttacaataaagagaagaaatatcgaagtcattaaaataaggagacttacttttatgacattctaatactaaaaaatatagaaatatttccttaattctagagaaactagttttactaattttttacaacttcaataataccatcattgacacttacctttattaattagcttctagaaaatagctgctaattaggttaatgaacattttaccttagtgaaaaaaattaattaaatatgattacaaagttgcacagcataactactgagaggaaagtgattgatctgtttgtaattacttgtttgtattggtgtgtataaaatacaaaatttacattaaactctaaatcatt

SEQ ID NO: 28 - DNA, 1607 bp, Homo sapiens
agacacggggcgtccggctaaggccggggacccagggtggtgggcggggtgtcccgcccgcctgtggaccccgcgcagtaactgcgaacatttcgctttcattttgggccgagctggaggcggcggggccgtcccggaacggctgcggccgggcacccsgggagttaatccgaaagcgccgcaagccccgcgggccggccgcaccgcacgtgtcaccgagaagctgatgtagagagagacacagaaggagacagaaagcaagagaccagagtcccgggaaagtcctgccgcgcctcgggacaattataaaaatgtggycccctgggtcagcctcccagccaccgccctcacctgccgcggccacaggtctgcatccagcggctcgccctgtgtccctgcagtgccggctcagcatgtgtccagcgcgcagcctcctccttgtggctaccctggtcctcctggaccacctcagtttggccagaaacctccccgtggccactccagacccaggaatgttcccatgccttcaccactcccaaaacctgctgagggccgtcagcaacatgctccagaaggccagacaaactctagaattttacccttgcacttctgaagagattgatcatgaagatatcacaaaagataaaaccagcacagtggaggcctgtttaccattggaattaaccaagaatgagagttgcctaaattccagagagacctctttcataactgtaagtcaaaaaatgaaaagtttcagcctgtatgatgaattcatatcactgatgtctgattattttttcctctagaatgggagttgcctggcctccagaaagacctcttttatgatggccctgtgccttagtagtatttatgaagacttgaagatgtaccaggtggagttcaagaccatgaatgcaaagcttctgatggatcctaagaggcagatctttctrgatcaaaacatgctggcagttattgatgagctgatgcaggccctgaatttcaacagtgagactrtgccacaaaaatcctcccttgaagaaccggatttttataaaactaaaatcaagctctgcatacttcttcatgctttcagaattcgggcagtgactattgayagagtgaygagctatctgaatgcttcctaaaaagcgaggtccctccaaaccgttgtcatttttataaaactttgaaatgaggaaactttgataggatgtggattaagaactagggaggggraaagaaggatgggacyattacatccacatratacctctgatcaagtatttttgacatttactgtggataaattgtttttaagttttcatgaatgaattgctaagaagggaaaatatccatcctgaaggtgtttttcattcactttaatagaagggcaaatatttataagctatttctgtaccaaagtgtttgtggaaacaaacatgtaagcataacttattttaaaatatttatttatataacttggtaatcatgaaagcatctgagctaacttatatttatttatgttatatttattaaattatttatcaagtgtatttgaaaaatatttttaagtgttctaaaaataaaagtattgaattaaagtg

SEQ ID NO: 29 - DNA, 1532 bp, Homo sapiens
agacacggggcgtccggctaaggccggggacccagggtggtgggcggggtgtcccgcccgcctgtggaccccgcgcagtaactgcgaacatttcgctttcattttgggccgagctggaggcggcggggccgtcccggaacggctgcggccgggcacccsgggagttaatccgaaagcgccgcaagccccgcgggccggccgcaccgcacgtgtcaccgagaagctgatgtagagagagacacagaaggagacagaaagcaagagaccagagtcccgggaaagtcctgccgcgcctcgggacaattataaaaatgtggycccctgggtcagcctcccagccaccgccctcacctgccgcggccacaggtctgcatccagcggctcgccctgtgtccctgcagtgccggctcagcatgtgtccagcgcgcagcctcctccttgtggctaccctggtcctcctggaccacctcagtttggccagaaacctccccgtggccactccagacccaggaatgttcccatgccttcaccactcccaaaacctgctgagggccgtcagcaacatgctccagaaggccagacaaactctagaattttacccttgcacttctgaagagattgatcatgaagatatcacaaaagataaaaccagcacagtggaggcctgtttaccattggaattaaccaagaatgagagttgcctaaattccagagagacctctttcataactaatgggagttgcctggcctccagaaagacctcttttatgatggccctgtgccttagtagtatttatgaagacttgaagatgtaccaggtggagttcaagaccatgaatgcaaagcttctgatggatcctaagaggcagatctttctrgatcaaaacatgctggcagttattgatgagctgatgcaggccctgaatttcaacagtgagactrtgccacaaaaatcctcccttgaagaaccggatttttataaaactaaaatcaagctctgcatacttcttcatgctttcagaattcgggcagtgactattgayagagtgaygagctatctgaatgcttcctaaaaagcgaggtccctccaaaccgttgtcatttttataaaactttgaaatgaggaaactttgataggatgtggattaagaactagggaggggraaagaaggatgggacyattacatccacatratacctctgatcaagtatttttgacatttactgtggataaattgtttttaagttttcatgaatgaattgctaagaagggaaaatatccatcctgaaggtgtttttcattcactttaatagaagggcaaatatttataagctatttctgtaccaaagtgtttgtggaaacaaacatgtaagcataacttattttaaaatatttatttatataacttggtaatcatgaaagcatctgagctaacttatatttatttatgttatatttattaaattatttatcaagtgtatttgaaaaatatttttaagtgttctaaaaataaaagtattgaattaaagtg

SEQ ID NO: 30 - DNA, 15471 bp, Homo sapiens
  misc_feature (1)...(15471): n = A,T,C or G, or insertion/deletion polymorphism (see Tables 1-2)
gcagacctaaaggagcgttcgctagcagaggcgctgccggtgcggtgtgctacgcgcgcccacctcccggggaaggaacggcgaggccggggaccgtcgcggagatggatcgcgggccggcagcagtggcgtgcacgctgctcctggctctcgtcgcctgcctagcsccggccagtggccaagaatgtgacagtgcgcattttcgctgtggaagtgggcattgcatccctgcagactggaggtgtgatgggaccaaagactgttcagatgacgcggatgaaattggctgcgctgttgtgacctgccagcagggctatttcaagtgccagagtgagggacaatgcatccccarctcctgggtgtgtgaccaagatcaagactgtgatgatggctcagatgaacrtcaagattgctcacaaagtacatgctcaagtcatcagataacatgctccaatggtcagtgtatcccaagtgaatacaggtgcgaccacgtcrgagactgcccmgatggagctgatgagaatgactgccagtacccaacatgtgagcagcttacttgtgacaatggggcctgctataacaccagtcagaagtgtgattggaaagttgattgcagggactcctcagatgaaatcaactgcactgagatatgcttgcacaatgagttttcatgtggcaatggagagtgtatccctcgtgcttatgtctgtgaccatgacaatgattgccaagacggcagtgaygaacatgcttgcaactatccgacctgcggtggttaccagttcacttgccccagtggccgatgcatttatcaaaactgggtttgtgatggagaagatgactgtaaagataatggagatgaagatggatgtgaaagcsgtcctcatgatgttcataaatgttccccaagagaatggtcttgcccagagtcgggacgatgcatctccatttataaagtttgtgatgggattttagattgcccaggaagagaagatgaaaacaacactagtaccggaaaatactgtagtatgactctgtgctctgccttgaactgccagtaccagtgccatgagacgccgtatggaggagcgtgtttttgtcccccaggttatatcatcaaccacaatgacagccgtacctgtgttgagtttgatgattgccagatatggggaatttgtgaccagaagtgtgaaagccgacctggccgtcacctgtgccactgtgaagaagggtatatcttggagcgtggacagtattgcaaagctaatgattcctttggcgaggcctccattatcttctccaatggtcgggatttgttaattggtgatattcatggaaggagcttccggatcctagtggagtctcagaatcgtggagtggccgtgggtgtggctttccactatcacctgcaaagagttttttggacagacaccgtgcaaaataaggttttttcagttgacattaatggtttaaatatccaagaggttctcaatgtttctgttgaaaccccagagaacctggctgtggactgggttaataataaaatctatctagtggaaaccaaggtcaaccgcatagatatggtaaatttggatggaagctatcgggttacccttataactgaaaacttggggcatcctagaggaattgccgtggacccaactgttggttatttatttttctcagattgggagagcctttctggggaacctaagctggaaagggcattcatggatggcagcaaccgtaaagacttggtgaaaacaaagctgggatggcctgctggggtaactctggatatgatatcgaagcgtgtttactgggttgactctcggtttgattacattgaaactgtaacttatgatggaattcaaaggaagactgtagttcatggaggctccctcattcctcatccctttggagtaagcttatttgaaggtcaggtgttctttacagattggacaaagatggccgtgctgaaggcaaacaagttcacagagaccaacccacaagtgtactaccaggcttccctgaggccctatggagtgactgtttaccattccctcagacagccctatgctaccaatccgtgtaaagataacaatggggrctgtgagcaggtctgtgtyctcagccacagaacagataatgatggtttgggtttccgttgcaagtgcacattcggcttccaactggatacagatgagcgccactgcattgctgttcagaatttcctcattttttcatcccaagttgctattcgtgggatcccgttcaccttgtctacccaggaagatgtcatggttccagtttcggggaatccttctttctttgtcgggattgattttgacgcccaggacagcactatctttttttcagatatgtcaaaacacatgatttttaagcaaaagattgatggcacaggaagagaaattctcgcagctaacagggtggaaaatgttgaaagtttggcttttgaytggatttcaaagaatctctattggacagactctcattacaagagtatcagtgtcatgaggctagctgataaaacgagacgcacrgtagttcagtatttaaataacccacggtcggtggtagttcatccttttgccgggtatctattcttcactgattggttccgtcctgctaaaattatgagagcatggagtgacggatctcacctcttgcctgtaataaacactactcttggatggcccaatggcttggccatcgattgggctgcttcacgattgtactgggtagatgcctattttgataaaattgagcacagcacctttgatggtttagacagaagaagactgggccrtatagagcagatgacacatccgtttggacttgccatctttggagagcatttattttttactgactggagactgggtgccattattcgagtcaggaaagcagatggtggagaaatgacagttatccgaagtggcattgcttacatactgcatttgaaatcgtatgatgtcaacatccagactggttctaacgcctgtaatcaacccacgcatcctaacggtgactgcagccacttctgcttcccggtgccaaatttccagcgagtgtgtgggtgcccttatggaatgaggctggcttccaatcacttgacatgcgagggggacccaacmaatgaaccacccacrgagcagtgtggcttattttccttcccctgtaaaaatggcagatgtgtgcccaattactatctctgtgatggagtcgatgattgtcatgataacagtgatgagcaactatgtggcacacttaataatacctgttcatcttcggcgttcacctgtggccatggggagtgcattcctgcacamtggcgctgtgacaaacgcaacgactgtgtggatggcagtgatgagcacaactgccccacccacgcacctgcttcctgccttgacacccaatacacctgtgataatcaccagtgtatctcaaagaactgggtctgtgacacagacaatgattgtggggatggatctgatgaaaagaactgcaattcgacagagacatgccaacctagtcagtttaattgccccaatcatcgatgtattgacctatcgtttgtctgtgatggtgacaaggattgtgttgatggatctgatgaggttggttgtgtattaaactgtactgcttctcaattcaagtgtgccagtggggataaatgtattggcgtcacaaatcgttgtgatggtgtttttgattgcagtgacaactcggatgaagcrggctgtccaaccaggcctcctggtatgtgccactcagatgaatttcagtgccaagaagatggtatctgcatcccgaacttctgggaatgtgatgggcatccagactgcctctatggatctgatgagcacaatgcctgtgtccccaagacttgcccttcatcatatttccactgtgmcaacggaaactgcatccacagggcatggctctgtgatcgggacaatgactgcggggatatgagtgatgagaaggactgccctactcagccctttcgctgtcctagttggcaatggcagtgtcttggccataacatctgtgtgaatctgagtgtagtgtgtgatggcatctttgactgccccaatgggacagatgagtccccactttgcaatgggaacagctgctcagatttcaatggtggttgtactcacgagtgtgttcaagagccctttggggctaaatgcctatgtccattgggattcttacttgccaatgattctaagacctgtgaagacatagatgaatgtgatattctaggctcttgtagccagcactgttacaatatgagaggttctttccgstgctcgtgtgatacaggctacatgttagaaagtgatgggaggacttgcaaagttacagcatctgagagtctgctgttacttgtggcaagtcagaacaaaattattgcsgacagtgtcacctcccaggtccacaatatctattcattggtcgagaatggttcttacattgtagctgttgattttgattcaattagtggtcgtatcttttggtctgatgcaactcagggtaaaacctggagtgcgtttcaaaatggaacggacagaagagtggtatttgacagtagcatcatcttgactgaaactattgcaatagattgggtaggtcgtaatctttactggacagactatgctctggaaacaattgaagtctccaaaattgatgggagccacaggactgtgctgattagtaaaaacctaacaaatccaagaggactagcattagatcccagaatgaatgagcatctactgttctggtctgactggggccaccaccctcgcatcgagcgagccagcatggacggcagcatgcgcactgtcattgtccaggacaagatcttctggccctgcggcttaactattgactaccccaacagactgctctacttcatggactcctatcttgattacatggacttttgygattataatggacaccatcggagacaggtgatagccagtgatttgattatacggcacccctatgccctaactctctttgaagactctgtgtactggactgaccgtgctactcgtcgggttatgcgagccaacaagtggcatggagggaaccagtcagttgtaatgtataatattcaatggccccttgggattgttgcggttcatccttcgaaacaaccaaattcygtgaatccatgtgccttttcccgctgcagccatctctgcctgctttcctcacaggggcctcatttttactcctgtgtttgtccttcaggatggagtctgtctcctgatctcctgaattgcttgagagatgatcaacctttcttaataactgtaaggcaacatataatttttggaatctcccttaatcctgaggtgaagagcaatgatgctatggtccccatagcagggatacagaatggtttagatgttgaatttgatgatgctgagcaatacatctattgggttgaaaatccaggtgaaattcacagagtgaagacagatggcaccaacaggacagtatttgcttctatatctatggtggggccttctatgaacctggccttagattggatttcaagaaacctttattctaccaatcctagaactcagtcaatcgaggttttgacactccacggagatatcagatacagaaaaacattgattgccaatgatgggacagctcttggagttggctttccaattggcataactgttgatcctgctcgtgggaagctgtactggtcagaccaaggaactgacagtggggttcctgccaagatcgscagtgctaacatggatggcacatctgtgaaaactctctttactgggaacctcgaacacctggagtgtgtcactcttgacatcgaagagcagaaactctactgggcagtcactggaagaggagtgattgaaagaggaaacgtggatggaacagatcgratgatcctggtacaccagctttcccacccctggggaattgcagtccatgattctttcctttattatactgatgaacagtatgaggtcattgaaagagttgataaggccactggggccaacaaaatagtcttgagagataatgttccaaatctgaggggtcttcaagtttatcacaracgcaatgcygccgaatcctcaaatggctgtagcaacaacatgaatgcctgtcagcagatttgcctgcctrtaccaggaggattgttttcctgcgcctgtgccactggatttaaactcaatcctgataatcggtcctgctctccatataactctttcaytgttgtttcaatgctgtctgcaatcagaggctttagcttggaattgtcagatcattcagaaaccatggtgccrgtggcaggccaaggacgaaacgcactgcatgtggatgtggatgtgtcctctggctttatttattggtgtgattttagcagctcagtggcatctgataatgcgatccgtagaattaaaccagatggatcttctctgatgaacattgtgacacatggaataggagaaaatggagtccggggtattgcagtggattgggtagcaggaamtctttatttcaccaatgcctttgtttctgaaacactgatagaagttctgcggatcaatactacttaccgccgtgttcttcttaaagtcacagtggacatgcctaggcatattgttgtagatcccaagaacagatacctcttctgggctgactatgggcagagaccaaagattgagcgttctttccttgactgtaccaatcgaacagtgcttgtgtcagagggcattgtcacaccacggggcttggcagtggaccgaagtgatggctacgtttattgggttgatgaytctttagatataattgcaaggattcgtatcaatggagagaactctgaagtrattcgttatggcagtcgttacccaactccttatggcatcrctgtttttgaaaattctatcatatgggtagataggaatttgaaaaagatcttccaagccagcaaggaaccagagaacacagagccacccacagtgataagagayaatatcaactggctaagagatgtgaccatctttgacaagcaagtccagccccggtcaccagcagaggtcaacaacaacccttgcttggaaaacaatggtgggtgctctcatctctgctttgctctgcctggattgcacaccccaaaatgtgactgtgcctttgggaccctgcaaagtgatggcaagaattgtgccatttcaacagaaaatttcctcatctttgccttgtctaattccttgagaagcttacacttggaccctgaaaaccatagcccacctttccaaacaataaatgtggraagaactgtcatgtctctagactatgacagtgtaagtgatagaatctacttcacacaaaatttagcctctggagttggacagatttcctatgccaccctgtcttcagggatccatactccaactgtcattgcttcaggtatagggactgctgatggcattgcctttgactggattactagaagaatttattacagtgactacctcaaccagatgattaattccatggctgaagatgggtctaaccgcactgtgatagcccgcgttccaaaaccaagagcaattgtgttagatccctgccaagggtacctgtactgggctgactgggatacacatgccaaaatcgagagagccacattgggaggaaacttccgcgtacccattgtgaacagcagtctggtcatgcccagtgggctgactctggactatgaagaggaccttctctactgggtggatgctagtctgcagaggattgaacgcagcactctgacgggcgtggatcgtgaagtcattgtcaatgcagccgttcatgcttttggcttgactctctatggccagtatatttactggactgacttgtacacacaaagaatttaccgagctaacaaatatgacgggtcaggtcagattgcaatgaccacaratttgctctcccagcccaggggartcaacactgttgtgaagaaccagaaacaacagtgtaacaatccttgtgaacagtttaatgggggctgcagccatatctgtgcaccaggtccaaatggtgccgagtgccagtgtccacatgagggcaactggtatttggccaacaacaggaagcactgcattgtggacaatggtgaacgatgtggtgcatcttccttcacctgctccaatgggcgctgcatctcggaagagtggaagtgtgataatgacaacgactgtggggatggcagtgatgagatggaaagtgtctgtgcacttcacacctgctcaccgacagccttcacctgtgccaatgggcgatgtgtccaatactcttaccgctgtgattactacaatgactgtggtgatggcagtgatgaggcagggtgcctgttcagggactgcaatgccaccacggagtttatgtgcaataacagaaggtgcatacctcgtgagtttatctgcaatggtgtagacaactgccatgataataacacttcagatgagaaaaattgccctgatcgcacttgccagtctggatacacaaaatgtcataattcaaatatttgtattcctcgcgtttatttgtgtgacggagacaatgactgtggagataacagtgatgaaaaccctacttattgcaccactcacacgtgcagcagcagtgagttccaatgcncatctgggcgctgtattcctcaacattggtattgtgatcaagaaacagattgttttgatgcctctgatgaacctgcctcttgtggtcactctgagcgaacatgcctagctgatgagttcaagtgtgatggtgggaggtgcatcccaagcgaatggatctgtgacggtgataatgactgtggggatatgagtgacgaggataaaaggcaccagtgtcagaatcaaaactgctcggattccgagtttctctgtgtaaatgacagacctccggacaggaggtgcattccccagtcttgggtctgtgatggcgatgtggattgtactgacggctacgatgagaatcagaattgcaccaggagaacttgctctgaaaatgaattcacctgtggttacggactgtgtatcccaaagatattcaggtgtgaccggcacaatgactgtggtgactatagcgacgagaggggctgcttataccagacttgccaacagaatcagtttacctgtcagaacgggcgctgcattagtaaaaccttcgtctgtgatgaggataatgactgtggagacggatctgatgagctgatgcacctgtgccacaccccagaacccacgtgtccacctcacgagttcaagtgtgacaatgggcgctgcatcgagatgatgaaactctgyaaccacctagatgactgtttggacaacagcgatgagaaaggctgtggcattaatgaatgccatgacccttcaatcagtggctgcgatcacaactgcacagacaccttaaccagtttctattgttcctgtcrtcctggttacaagctcatgtctgacaagcggacttgtgttgatattgatgaatgcacagagatgccttttgtctgtagccagaagtgtgagaatgtaataggctcctacatctgtaagtgtgccccaggctacctccgagaaccagatggaaagacctgccggcaaaacagtaacatcgaaccctatctcatttttagcraccgttactatttgagaaatttaactatagatggctatttttactccctcatcttggaaggactggacaatgttgtggcattagattttgaccgagtagagaagagattgtattggattgatacacagaggcaagtcattgagagaatgtttctgaataagacaaacaaggagacaatcataaaccacagactaccagctgcagaaagtctggctgtagactgggtttccagaaagctctactggttggatgcccgcctggatggcctctttgtctctgacctcaatggtggacaccgccrcatgctggcccagcactgtgtggatgccaacaacaccttctgctttgataatcccagaggacttgcccttcaccctcaatatgggtacctctactgggcagactggggtcaccgcgcatacattgggagagtaggcatggatggaaccaacaagtctgtgataatctccaccaagttagagtggcctaatggcatcaccattgattacaccaatgatctactctactgggcagatgcccacctgggttacatagagtactctgatttggagggccaccatcgacacacggtgtatgatggggcactgcctcaccctttcgctattaccatttttgaagacactatttattggacagattggaatacaaggacagtggaaaagggaaacaaatatgatggatcaaatagacagacactggtgaacacaacacacagaccatttgacatccatgtgtaccatccatataggcagcccattgtgagcaatccctgtggtaccaacaatggtggctgttctcatctctgcctcatcaagccaggaggaaaagggttcacttgcgagtgtccagatgacttccgcacccttcarctgagtggcagcacctactgcatgcccatgtgctccagcacccagttcctgtgcgctaacaatgaaaagtgcattcctatctggtggaaatgtgatggacagaaagactgctcagatggctctgatgaactggccctttgcccgcagcgcttctgccgactgggacagttccagtgcagtgacggcaactgcaccagcccgcagactttatgcaatgctcaccaaaattgccctgatgggtctgatgaagaccgtcttctttgtgagaatcaccactgtgactccaatgaatggcagtgcgccaacaaacgttgcatcccagaatcctggcagtgtgacacatttaacgactgtgaggataactcagatgaagacagttcccactgtgccagcaggacctgccggccgggccagtttcggtgtgctaatggccgctgcatcccgcaggcctggaagtgtgatgtggataatgattgtggagaccactcggatgagcccattgaagaatgcatgagctctgcccatctctgtgacaacttcacagaattcagctgcaaaacaaattaccgctgcatcccaaagtgggccrtgtgcaatggtgtagatgactgcagggacaacagtgatgagcaaggctgtgaggagaggacatgccatcctgtgggggatttccgctgtaaaaatcaccactgcatccctcttcgttggcagtgtgatgggcaaaatgactgtggagataactcagatgaggaaaactgtgctccccgggagtgcacagagagcgagtttcgatgtgtcaatcagcagtgcattccctcgcgatggatctgtgaccattacaacgactgtggggacaactcagatgaacgggactgtgagatgaggacctgccatcctgaatattttcagtgtacaagtggacattgtgtacacagtgaactgaaatgcgatggatccgctgactgtttggatgcgtctgatgaagctgattgtcccacacgctttcctgatggtgcatactgccaggctactatgttcgaatgcaaaaaccatgtttgtatcccgccatattggaaatgtgatggcgatgatgactgyggcgatggttcagatgaagaacttcacctgtgcttggatgttccctgtaattcaccaaaccgtttccggtgtgacaacaatcgctgcatttatagtcatgaggtgtgcaatggtgtggatgactgtggagatggaactgatgagacagaggagcactgtagaaaaccgacccctaaaccttgtacagaatatgaatataagtgtggcaatgggcattgcattccacatgacaatgtgtgtgatgatgccgatgactgtggtgactggtccgatgaactgggttgcaataaaggaaaagaaagaacatgtgctgaaaatatatgcgagcaaaattgtacccaattaaatgaaggaggatytatctgctcctgtacagctgggttcgaaaccaatgtttttgacagaacctcctgtctagatatcaatgaatgtgaacaatttgggacttgtccccagcactgcagaaataccaaaggaagttatgagtgtgtctgtgctgatggcttcacgtctatgagtgaccgccctggaaaacgatgtgcagctgagggtagctctcctttgttgctactgcctgacaatgtccgaattcgaaaatataatctctcatctgagaggttctcagagtatcttcaagatgaggaatatatccaagctgttgattatgattgggatcccraggacataggcctcagtgttgtgtattacactgtgcgaggggagggctctaggtttggtgctatcaaacgtgcctacatccccaactttgaatccggccgcaataatcttgtgcaggaagttgacctgaaactgaaataygtaatgcagccagatggaatagcagtggactgggttggaaggcatatttactggtcagatgtcaagaataaacgcattgaggtggctaaacttgatggaaggtacagaaagtggctgatttccactgacctggaccaaccagctgctattgctgtgaatcccaaactagggcttatgttctggactgactggggaaaggaacctaaamtcgagtctgcctggatgaatggagaggaccgcaacatcctggttttcgaggaccttggttggccaactggcctttctatcgattatttgaacaatgrccgaatctactggagtgacttcaaggaggacgttattgaaaccataaaatatgatgggactgataggagagtcattgcaaaggaagcaatgaacccttacagcctggacatctttgaagaccagttatactggatatctaaggaaaagggagaagtatggaaacaaaataaatttgggcaaggaaagaaagagaaaacgctggtagtgaacccttggctcactcaagttcgaatctttcatcaactcagatacaataagtcagtgcccaacctttgcaaacagatctgcagccacctctgccttctgagacctggaggatacagctgtgcctgtccccaaggctccagctttatagaggggagcaccactgagtgtgatgcagccatygaactgcctatcaacctgccccccccatgcaggtgcatgcayggaggaaattgctattttgatgagactgacctccccaaatgcaagtgtcctagcggctacaccggaaaatattgtgaaatggcgttttcaaaaggcatctctccaggaacaaccgcagtagctgtgctgttgacaatcctcttgatcgtcgtaattggagctctggcaattgcaggattcttccactatagaaggaccggctcccttttgcctgctctgcccaagctgccaagcttaagcagtctcgtcaagccctctgaaaatgggaatggggtgaccttcagatcaggggcagatcttaacatggatattggagtgtctggttttggacctgagactgctattgacaggtcaatggcaatgagtgaagactttgtcatggaaatgggraagcagcccataatatttgaaaacccaatgtactcagccagagacagtgctgtcaaagtggttcagccaatccaggtgactgtatctgaaaatgtggataataagaattatggaagtcccataaacccttctgagatagttccagagacaaacccaacttcaccagctgctgatggaactcaggtgacaaaatggaatctcttcaaacgaaaatctaaacaaactaccaactttgaaaatccaatctatgcacagatrgagaacgagcaaaaggaaagtgttgctgcgacaccacctccatcaccttcgctccctgctaagcctaagcctccttcgagaagagacccaactccaacctattctgcaacagaagacacttttaaagacaccgcaaatcttgttaaagaagactctgaagtatagctataccagctatttagggaataattagaaacacacttttgcacatatattttttacaaacagatgaaaaaagttaacattcagtactttatgaaaaaaatatatttttccctgtttgcctatagttggaggtatcctgtgtgtctttttttacttatgccgtctcatatttttacaaataattatcacaatgtactatatgtatatctttgcactgaagttgtctgaaggtaatactataaatatattgtatatttgtaaattttggaaagattatcctgttactgaatttgctaataaagatgtctgctgatttggttggtgatcattatagtaaatgatccaacaagaaaaggaattgactggggacctttagccgtgtctaaagaagaggcaccactcatatttcctataaaattatctaggaaaggaatccaggccccgctcttgggtccatttttacacattagcacttaattaatgttcaatattacatgtcaatttgattaatggctatgttgataggggccactatgtgttgtatagacatctggacttgactgtagactcctcagataatacagaaggtaggaaaagcaattcagtttggcccttctgtgtgttggcattgtctaaccagaactctctgtttcatgtgtgttctctcactagctgccaagacaacatttttatttgtgatgtctatgaggaaatcccatatcattaagtgccagtgtcctgcattgagtttgtggttaattaaatgagctcttctgctgatggaccctggagcaatttctcccctcacctgacattcaaggtggtcacctgccctagtagttggagctcagtagctgaatttctgaaaccaaatctgtgtcttcataaaataaggtgcaaaaaaaaaaaataccagttaagtaaagcctcaactgggtttttgtttctatgaaaatatcattataatcactatttatttcctaagttgaacctgaatagaaagggaaaccattcttattaagctttttattaggccctgtggctaaatgtgtacatttatattaraatgtactgtacagtccagatcttttctttaattcttattggttttttttttttttttttttttagagatggagtcttgctatattgccaaggctgatcttgaagtcctgggctcaagtgatcctcccacctcagcctcctgagtggttggggttacgggcgtgagccactgtgcctggcttccagctctcctcttaaatagtgggtatagtctgcacaacaggaaccatggcaggaatatacactttcccatagcaaatagcatacctgactctctgtgctaatattgcacatttgttaaacaatgaatgaadggatggatggatggatggat

SEQ ID NO: 31 - DNA, 1942 bp, Homo sapiens
cgcctggccccggctctctggaccttgtctcgctcgggagcggaaacagcggcagccagagcataaaatacacaagaggatttttatggaatgrctccttgttacaagaactgttttaatcatggacaaacaaaactcacagatgaatgcttctcacccggaaacaaacttgccagttgggtatcctcctcagtatccaccgacagcattccaaggacctccaggatatagtggctaccctgggccccaggtcagctacccacccccaccagccggccattcaggtcctggcccagctggctttcctgtcccaaatcagccagtgtataatcagccagtatataatcagccagttggagctgcaggggtaccatggatgccagcgccacagcctccattaaactgtccacctggattagaatatttaagtcagatagatcagatactgattcatcagcaaattgaacttctggaagttttaacaggttttgaaactaataacaaatatgaaattaagaacagctttggacagagggtttactttgcagcggaagatactgattgctgtacccgaaattgctgtgggccatctagaccttttaccttgaggattattgataatatgggtcaagaagtcataactctggagagaccactaagatgtagcagctgttgttgtccctgctgccttcaggaggtctaaatccaagctcctcctggtgtaccaataggttatgttattcagacttggcacccatgtctaccaaagtttacaattcaaaatgagaaaagagaggatgtactaaaaataagtggtccatgtgttgtgtgcagctgttgtggagatgttgattttgagattaaatctcttgatgaacagtgtgtggttggcaaaatttccaagyactggactggaattttgagagaggcatttacagacgctgataactttggaatccarttccctttagaccttgatgttaaaatgaaagctgtaatgattggtgcctgtttcctcattgacttcatgttttttgaaagcactggcagccaggaacaaaaatcaggagtgtggtagtggattagtgaaagtctcctcaggaaatctgaagtctgtatattgattgagactatctaaactcatacctgtatgaattaagctgtaaggcctgtagctctggttgtatacttttgcttttcaaattatagtttatcttctgtataactgatttataaaggtttttgtacattttttaatactcattgtcaatttgagaaaaaggacatatgagtttttgcatttattaatgaaacttcctttgaaaaactgctttgaattatgatctctgattcattgtccattttactaccaaatattaactaaggccttattaatttttatataaattatatcttgtcctattaaatctagttacaatttatttcatgcataagagctaatgttattttgcaaatgccatatattcaaaaaagctcaaagataattttctttactattatgttcaaataatattcaatatgcatattatctttaaaaagttaaatgtttttttaatcttcaagaaatcatgctacacttaacttctcctagaagctaatctataccataatattttcatattcacaagatattaaattaccaattttcaaattattgttagtaaagaacaaaatgattctctcccaaagaaagacacattttaaatactccttcactctaaaactctggtattataacttttgaaagttaatatttctacatgaaatgtttagctcttacactctatccttcctagaaaatggtaattgagattactcagatattaattaaatacaatatcatatatatattcacagagtataaacctaaataatgatctattagattcaaatatttgaaataaaaacttgatttttttgt

SEQ ID NO: 32 - DNA, 986 bp, Homo sapiens
cgcctggccccggctctctggaccttgtctcgctcgggagcggaaacagcggcagccagagcataaaatacacaagaggatttttatggaatgrctccttgttacaagaactgttttaatcatggacaaacaaaactcacagatgaatgcttctcacccggaaacaaacttgccagttgggtatcctcctcagtatccaccgacagcattccaaggacctccaggatatagtggctaccctgggccccaggtcagctacccacccccaccagccggccattcaggtcctggcccagctggctttcctgtcccaaatcagccagtgtataatcagccagtatataatcagccagttggagctgcaggggtaccatggatgccagcgccacagcctccattaaactgtccacctggattagaatatttaagtcagatagatcagatactgattcatcagcaaattgaacttctggaagttttaacaggttttgaaactaataacaaatatgaaattaagaacagctttggacagagggtttactttgcagcggaagatactgattgctgtacccgaaattgctgtgggccatctagaccttttaccttgaggattattgataatatgggtcaagaagtcataactctggagagaccactaagatgtagcagctgttgttgtccctgctgccttcaggaggtctgtgatcaattaccagggcactttgtaaaatagttcagcaagaatttctgccctgtcattgaacctttcatcgaacctaggcattatgattattacatttacatatattattttgcctttgtagatagaaatccaagctcctcctggtgtaccaataggttatgttattcagacttggcacccatgtctaccaaagtttacaattcaaaatgagaaaagagaggatgtactaaaaataagtggtccatgtgttgtgtgcagctgttgtggagatgttgattttgag

SEQ ID NO: 33 - DNA, 1609 bp, Homo sapiens
ccaccggacaaacgtctctggagtctctccaatgagcaagaaagcaagtcgggggtaggggaggggcctcacaccagggggtgggcgcagtccctcctccagctccttcaccctccagtagtctcgtgggtccccgagcgccagcgcgggaaccgggaaaaggaaaccgtgttgtgtacgtaagattcaggaaacgaaaccaggagccgcgggtgttggcgcaaaggttactcccagacccttttccggctgacttctgagaaggttgcgcagcagctgtgcccgrcagtctagaggcgcagaagaggaagccatcgcctggccccggctctctggaccttgtctcgctcgggagcggaaacagcggcagccagagaactgttttaatcatggacaaacaaaactcacagatgaatgcttctcacccggaaacaaacttgccagttgggtatcctcctcagtatccaccgacagcattccaagatagatcagatactgattcatcagcaaattgaacttctggaagattaaatctcttgatgaacagtgtgtggttggcaaaatttccaagyactggactggaattttgagagaggcatttacagacgctgataactttggaatccarttccctttagaccttgatgttaaaatgaaagctgtaatgattggtgcctgtttcctcattgacttcatgttttttgaaagcactggcagccaggaacaaaaatcaggagtgtggtagtggattagtgaaagtctcctcaggaaatctgaagtctgtatattgattgagactatctaaactcatacctgtatgaattaagctgtaaggcctgtagctctggttgtatacttttgcttttcaaattatagtttatcttctgtataactgatttataaaggtttttgtacattttttaatactcattgtcaatttgagaaaaaggacatatgagtttttgcatttattaatgaaacttcctttgaaaaactgctttgaattatgatctctgattcattgtccattttactaccaaatattaactaaggccttattaatttttatataaattatatcttgtcctattaaatctagttacaatttatttcatgcataagagctaatgttattttgcaaatgccatatattcaaaaaagctcaaagataattttctttactattatgttcaaataatattcaatatgcatattatctttaaaaagttaaatgtttttttaatcttcaagaaatcatgctacacttaacttctcctagaagctaatctataccataatattttcatattcacaagatattaaattaccaattttcaaattattgttagtaaagaacaaaatgattctctcccaaagaaagacacattttaaatactccttcactctaaaactctggtattataacttttgaaagttaatatttctacatgaaatgtttagctcttacactctatccttcctagaaaatggtaattgagattactcagatattaattaaatacaatatcatatatatattcacagagtataaacctaaataatgatctattagattcaaatatttgaaataaaaacttgatttttttgt

SEQ ID NO: 34 - DNA, 906 bp, Homo sapiens
ccaccggacaaacgtctctggagtctctccaatgagcaagaaagcaagtcgggggtaggggaggggcctcacaccagggggtgggcgcagtccctcctccagctccttcaccctccagtagtctcgtgggtccccgagcgccagcgcgggaaccgggaaaaggaaaccgtgttgtgtacgtaagattcaggaaacgaaaccaggagccgcgggtgttggcgcaaaggttactcccagacccttttccggctgacttctgagaaggttgcgcagcagctgtgcccgrcagtctagaggcgcagaagaggaagccatcgcctggccccggctctctggaccttgtctcgctcgggagcggaaacagcggcagccagagaactgttttaatcatggacaaacaaaactcacagatgaatgcttctcacccggaaacaaacttgccagttgggtatcctcctcagtatccaccgacagcattccaaggacctccaggatatagtggctaccctgggccccaggtcagctacccacccccaccagccggccattcaggtcctggcccagctggctttcctgtcccaaatcagccagtgtataatcagccagtatataatcagccagttggagctgcaggggtaccatggatgccagcgccacagcctccattaaactgtccacctggattagaatatttaagtcagatagatcagatactgattcatcagcaaattgaacttctggaagattaaatctcttgatgaacagtgtgtggttggcaaaatttccaagyactggactggaattttgagagaggcatttacagacgctgataactttggaatccarttccctttagaccttgatgttaaaatgaaagctgtaatgattggtgcctgtttcctcatt

SEQ ID NO: 35 - DNA, 1003 bp, Homo sapiens
cgcagtccctcctccagctccttcaccctccagtagtctcgtgggtccccgagcgccagcgcgggaaccgggaaaaggaaaccgtgttgtgtacgtaagattcaggaaacgaaaccaggagccgcgggtgttggcgcaaaggttactcccagacccttttccggctgacttctgagaaggttgcgcagcagctgtgcccgrcagtctagaggcgcagaagaggaagccatcgcctggccccggctctctggaccttgtctcgctcgggagcggaaacagcggcagccagaggaccacataaacccattttgaattattcaaccattgctgaacttcttgaaactgttttaatcatggacaaacaaaactcacagatgaatgcttctcacccggaaacaaacttgccagttgggtatcctcctcagtatccaccgacagcattccaaggacctccaggatatagtggctaccctgggccccaggtcagctacccacccccaccagccggccattcaggtcctggcccagctggctttcctgtcccaaatcagccagtgtataatcagccagtatataatcagccagttggagctgcaggggtaccatggatgccagcgccacagcctccattaaactgtccacctggattagaatatttaagtcaggtaatttcaaagacacaaaatactcataaaaaacagaactgtgcttccagcttgcttaaccagattagcaaatgaataattcaccaaagtctgaaatagcaaaactgtatttyctgctaacagattactctaattcttctaggtctggttcaattttaaagcaaaatacaaatgccttagaaaattgtattttctgttatcttaaatacaatctatgataatggccaatagcaaacatttaattagcactgtttcctgcctttgttgtatgcctgatacatgtattaactcatttaawccttattgaaagtctgtgatgtataggtgctacatttttc

SEQ ID NO: 36 - DNA, 2210 bp, Homo sapiens
ccaccggacaaacgtctctggagtctctccaatgagcaagaaagcaagtcgggggtaggggaggggcctcacaccagggggtgggcgcagtccctcctccagctccttcaccctccagtagtctcgtgggtccccgagcgccagcgcgggaaccgggaaaaggaaaccgtgttgtgtacgtaagattcaggaaacgaaaccaggagccgcgggtgttggcgcaaaggttactcccagacccttttccggctgacttctgagaaggttgcgcagcagctgtgcccgrcagtctagaggcgcagaagaggaagccatcgcctggccccggctctctggaccttgtctcgctcgggagcggaaacagcggcagccagagaactgttttaatcatggacaaacaaaactcacagatgaatgcttctcacccggaaacaaacttgccagttgggtatcctcctcagtatccaccgacagcattccaaggacctccaggatatagtggctaccctgggccccaggtcagctacccacccccaccagccggccattcaggtcctggcccagctggctttcctgtcccaaatcagccagtgtataatcagccagtatataatcagccagttggagctgcaggggtaccatggatgccagcgccacagcctccattaaactgtccacctggattagaatatttaagtcagatagatcagatactgattcatcagcaaattgaacttctggaagttttaacaggttttgaaactaataacaaatatgaaattaagaacagctttggacagagggtttactttgcagcggaagatactgattgctgtacccgaaattgctgtgggccatctagaccttttaccttgaggattattgataatatgggtcaagaagtcataactctggagagaccactaagatgtagcagctgttgttgtccctgctgccttcaggagatagaaatccaagctcctcctggtgtaccaataggttatgttattcagacttggcacccatgtctaccaaagtttacaattcaaaatgagaaaagagaggatgtactaaaaataagtggtccatgtgttgtgtgcagctgttgtggagatgttgattttgagattaaatctcttgatgaacagtgtgtggttggcaaaatttccaagyactggactggaattttgagagaggcatttacagacgctgataactttggaatccarttccctttagaccttgatgttaaaatgaaagctgtaatgattggtgcctgtttcctcattgacttcatgttttttgaaagcactggcagccaggaacaaaaatcaggagtgtggtagtggattagtgaaagtctcctcaggaaatctgaagtctgtatattgattgagactatctaaactcatacctgtatgaattaagctgtaaggcctgtagctctggttgtatacttttgcttttcaaattatagtttatcttctgtataactgatttataaaggtttttgtacattttttaatactcattgtcaatttgagaaaaaggacatatgagtttttgcatttattaatgaaacttcctttgaaaaactgctttgaattatgatctctgattcattgtccattttactaccaaatattaactaaggccttattaatttttatataaattatatcttgtcctattaaatctagttacaatttatttcatgcataagagctaatgttattttgcaaatgccatatattcaaaaaagctcaaagataattttctttactattatgttcaaataatattcaatatgcatattatctttaaaaagttaaatgtttttttaatcttcaagaaatcatgctacacttaacttctcctagaagctaatctataccataatattttcatattcacaagatattaaattaccaattttcaaattattgttagtaaagaacaaaatgattctctcccaaagaaagacacattttaaatactccttcactctaaaactctggtattataacttttgaaagttaatatttctacatgaaatgtttagctcttacactctatccttcctagaaaatggtaattgagattactcagatattaattaaatacaatatcatatatatattcacagagtataaacctaaataatgatctattagattcaaatatttgaaataaaaacttgatttttttgt

SEQ ID NO: 37 - DNA, 1875 bp, Homo sapiens
gaggaagccatcgcctggccccggctctctggaccttgtctcgctcgggagcggaaacagcggcagcactcacagatgaatgcttctcacccggaaacaaacttgccagttgggtatcctcctcagtatccaccgacagcattccaaggacctccaggatatagtggctaccctgggccccaggtcagctacccacccccaccagccggccattcaggtcctggcccagctggctttcctgtcccaaatcagccagtgtataatcagccagtatataatcagccagttggagctgcaggggtaccatggatgccagcgccacagcctccattaaactgtccacctggattagaatatttaagtcagatagatcagatactgattcatcagcaaattgaacttctggaagttttaacaggttttgaaactaataacaaatatgaaattaagaacagctttggacagagggtttactttgcagcggaagatactgattgctgtacccgaaattgctgtgggccatctagaccttttaccttgaggattattgataatatgggtcaagaagtcataactctggagagaccactaagatgtagcagctgttgttgtccctgctgccttcaggaggtctaaatccaagctcctcctggtgtaccaataggttatgttattcagacttggcacccatgtctaccaaagtttacaattcaaaatgagaaaagagaggatgtactaaaaataagtggtccatgtgttgtgtgcagctgttgtggagatgttgattttgagattaaatctcttgatgaacagtgtgtggttggcaaaatttccaagyactggactggaattttgagagaggcatttacagacgctgataactttggaatccarttccctttagaccttgatgttaaaatgaaagctgtaatgattggtgcctgtttcctcattgacttcatgttttttgaaagcactggcagccaggaacaaaaatcaggagtgtggtagtggattagtgaaagtctcctcaggaaatctgaagtctgtatattgattgagactatctaaactcatacctgtatgaattaagctgtaaggcctgtagctctggttgtatacttttgcttttcaaattatagtttatcttctgtataactgatttataaaggtttttgtacattttttaatactcattgtcaatttgagaaaaaggacatatgagtttttgcatttattaatgaaacttcctttgaaaaactgctttgaattatgatctctgattcattgtccattttactaccaaatattaactaaggccttattaatttttatataaattatatcttgtcctattaaatctagttacaatttatttcatgcataagagctaatgttattttgcaaatgccatatattcaaaaaagctcaaagataattttctttactattatgttcaaataatattcaatatgcatattatctttaaaaagttaaatgtttttttaatcttcaagaaatcatgctacacttaacttctcctagaagctaatctataccataatattttcatattcacaagatattaaattaccaattttcaaattattgttagtaaagaacaaaatgattctctcccaaagaaagacacattttaaatactccttcactctaaaactctggtattataacttttgaaagttaatatttctacatgaaatgtttagctcttacactctatccttcctagaaaatggtaattgagattactcagatattaattaaatacaatatcatatatatattcacagagtataaacctaaataatgatctattagattcaaatatttgaaataaaaacttgatttttttgt

SEQ ID NO: 38 - DNA, 2184 bp, Homo sapiens
ccaccggacaaacgtctctggagtctctccaatgagcaagaaagcaagtcgggggtaggggaggggcctcacaccagggggtgggcgcagtccctcctccagctccttcaccctccagtagtctcgtgggtccccgagcgccagcgcgggaaccgggaaaaggaaaccgtgttgtgtacgtaagattcaggaaacgaaaccaggagccgcgggtgttggcgcaaaggttactcccagacccttttccggctgacttctgagaaggttgcgcagcagctgtgcccgrcagtctagaggcgcagaagaggaagccatcgcctggccccggctctctggaccttgtctcgctcgggagcggaaacagcggcagccagagactcacagatgaatgcttctcacccggaaacaaacttgccagttgggtatcctcctcagtatccaccgacagcattccaaggacctccaggatatagtggctaccctgggccccaggtcagctacccacccccaccagccggccattcaggtcctggcccagctggctttcctgtcccaaatcagccagtgtataatcagccagtatataatcagccagttggagctgcaggggtaccatggatgccagcgccacagcctccattaaactgtccacctggattagaatatttaagtcagatagatcagatactgattcatcagcaaattgaacttctggaagttttaacaggttttgaaactaataacaaatatgaaattaagaacagctttggacagagggtttactttgcagcggaagatactgattgctgtacccgaaattgctgtgggccatctagaccttttaccttgaggattattgataatatgggtcaagaagtcataactctggagagaccactaagatgtagcagctgttgttgtccctgctgccttcaggagatagaaatccaagctcctcctggtgtaccaataggttatgttattcagacttggcacccatgtctaccaaagtttacaattcaaaatgagaaaagagaggatgtactaaaaataagtggtccatgtgttgtgtgcagctgttgtggagatgttgattttgagattaaatctcttgatgaacagtgtgtggttggcaaaatttccaagyactggactggaattttgagagaggcatttacagacgctgataactttggaatccarttccctttagaccttgatgttaaaatgaaagctgtaatgattggtgcctgtttcctcattgacttcatgttttttgaaagcactggcagccaggaacaaaaatcaggagtgtggtagtggattagtgaaagtctcctcaggaaatctgaagtctgtatattgattgagactatctaaactcatacctgtatgaattaagctgtaaggcctgtagctctggttgtatacttttgcttttcaaattatagtttatcttctgtataactgatttataaaggtttttgtacattttttaatactcattgtcaatttgagaaaaaggacatatgagtttttgcatttattaatgaaacttcctttgaaaaactgctttgaattatgatctctgattcattgtccattttactaccaaatattaactaaggccttattaatttttatataaattatatcttgtcctattaaatctagttacaatttatttcatgcataagagctaatgttattttgcaaatgccatatattcaaaaaagctcaaagataattttctttactattatgttcaaataatattcaatatgcatattatctttaaaaagttaaatgtttttttaatcttcaagaaatcatgctacacttaacttctcctagaagctaatctataccataatattttcatattcacaagatattaaattaccaattttcaaattattgttagtaaagaacaaaatgattctctcccaaagaaagacacattttaaatactccttcactctaaaactctggtattataacttttgaaagttaatatttctacatgaaatgtttagctcttacactctatccttcctagaaaatggtaattgagattactcagatattaattaaatacaatatcatatatatattcacagagtataaacctaaataatgatctattagattcaaatatttgaaataaaaacttgatttttttgt

SEQ ID NO: 39 - DNA, 2997 bp, Homo sapiens
  misc_feature (1)...(2997): n = A,T,C or G, or insertion/deletion polymorphism (see Tables 1-2)
gttctcatgysttccattwattttgtctctcaaattttaggaatcttctcctttaattaactcatcaacctctcatggcaagaatttgagaaagkaaatttatactmaggttctaattttaatagggaaggaaraagttacagctcagtgcaccatgaagttgagrcagagatggagacacctcagccccacctctctgsaacaggaaagatgattggrgagggagcacaggtcagcgtgggaagagggtcatggtggacatsggggtkgggtgstctccccacctcctcacattatgcctacangaacacagacacatgcaggtgcctttgcagaaacaaagtcagggtwcttcaagycacaaagggaagggcaggaacaamtcttgcctctcagtcccacacaaggcagctgtctcacactttacaagctgtgagrgacayatcagagccctgggcactgtcactgcttgcagcctgagtcctcctccacctcacagcagcgaccacagctccagygawcayagctccaaagagaacyaggccagcaatgatgcccacgatggggayggtgggctgggaagacrgctcccatctcagggtgaggggcttgggcaraccctcatgctgcacatggcaggtgtatctctkctcctbtccagaaggyaccaccacagmcrcccacttctggaaggtyccatcccctgcaggcctggtctccacragctccgtgtcctgggtctggtcctccccatcccgctgccaggtcagtgtgatctccgcagggtagaagcycagggcccagcayctcagrgtggcytcatggtcagagayrgsgtggtgrgtcatatgygtyttgggggcgtccgtgcgctgcagcgtctccttcccgttctccaggtatctgcggagccactccacgcacgtgccmtccaggtagrctctcaactgctccgccdsayggrccgyctcccacttgygctkggtgrtctgagcygccatgtccgccgcggtccaagagcgcaggtcctckttcarggcgatgtaatccttgccgtcgtargcgtmctgsyggtacccgcggaggargcgccmgtccgrccccacgtcgcagccawacatymtctggaygggtgttagaccctggccccgcccccgckgtcagccccgcccaccgagccccgcccccgccccgaccaacccgcggggattttggctgaaaatgaaaccgggtaaaggcgcctgggcctctcccaggtcaagggtctcggggtcccgcggtttcggggaggatctcggacccagagactcgaggcgacccggccctccgtgggggatggggaggggtcgtgacctgcgycccgggccggggtcactcaccgccctcgctctggttgtagtagctgtctcctcttcccaatactcyggcccctcctgctccacccacggcgcccgcggctccatcctgggactcgtggcgtcgctgtcgagscgcacgcactgcgtgtcgtccacgtcgcccacggagaggaagcggggatccgcgcggccgggccgggacatggtggtgtggaaatacctcaaggagtggaagcctgggagcaaggagggggctgagacbctcccgaccctcctcccggcaccgcaaccgggttcctgmgcccccgccgggcaggmccctagctactccccacagasgccgtttccctcccgaccccgcactcacctgcccaggtctgggtcaggaccagggcccccgagagcagcagaagcagggttcggggcgccatgacaccatcctcggcgactgggragaatcggagtcccggtgggtgcgtgggaactttagaaccgggaccgcggctacattgattggcttctctagraacccgacactcaatgggagtgagaactggggcagcckggtgagtakccaggaagaaggacccgacacaggttgggagagggagaagagaaaccctgcrragatggggaatscccagcgctgggcctccccaatccatacaccgcctttggggcctgagatcctgagagccakgcctgaggccctgggacttcgccctgaccccgctacttctgtgccaagcgctctgtctcaamgtttccgagtcttggcccaggagctgtctgagaaaccagggagaaaccctcgraatgggccccgtbcctctctcttcactttgcatcacggaatccccgtcccagaactggactccctgcctcctactccttacctgtccccgtggactcttctagaagaaaaatcacbccagggagcttgttgccagagagtgagcttgccctgggaatggaggtgtagagacagggttttttgttgttrttgtttgtttgttttttaaatctggaaaagttgtgcctgagtgcatgagatagaatagagaccagtttgctttttgtttattaactacagtgggtagcagaatcttggtaactcctratgatcaggaatctaatbggccaaaaatgtgactttggtcccttgacatataaatgtgtctaaaagcattacaacaggaatcacaaagctcctaagtttcactttyccagacaatgtatctgtgactcccgcttgtagtattttaaatttaccttcattccatagccctgagtttctgtgtgagtccaggacatctcctaatacaaggtagccactgtgttactatatgttgtaaccaggagccagtacrgactttattcahctcacagtggcaagcactcaatgcagtcacaatgcccctcaccagtgctcatgcactgcctgtttttaggaagtatccacttctaagtgttgtgtatattttatatgaacacttagtattttttaaacctgattaacataaaaaaattagtttttaggcagacccacataaggtattaaaggccaactgcaaagatcaccctgcaaggctctgtagattgatgtattaaaatatataaaacaatgtgtttaaacctg

SEQ ID NO: 40 - DNA, 2132 bp, Homo sapiens
ccgtgcgctgcagcgtctccttcccgttctccaggtatctgcggagccactccacgcacgtgccmtccaggtagrctctcaactgctccgccdsayggrccgyctcccacttgygctkggtgrtctgagcygccatgtccgccgcggtccaagagcgcaggtcctckttcarggcgatgtaatccttgccgtcgtargcgtmctgsyggtacccgcggaggargcgccmgtccgrccccacgtcgcagccawacatymtctggaygggtgttagaccctggccccgcccccgckgtcagccccgcccaccgagccccgcccccgccccgaccaacccgcggggattttggctgaaaatgaaaccgggtaaaggcgcctgggcctctcccaggtcaagggtctcggggtcccgcggtttcggggaggatctcggacccagagactcgaggcgacccggccctccgtgggggatggggaggggtcgtgacctgcgycccgggccggggtcactcaccgccctcgctctggttgtagtagctgtctcctcttcccaatactcyggcccctcctgctccacccacggcgcccgcggctccatcctgggactcgtggcgtcgctgtcgagscgcacgcactgcgtgtcgtccacgtcgcccacggagaggaagcggggatccgcgcggccgggccgggacatggtggtgtggaaatacctcaaggagtggaagcctgggagcaaggagggggctgagacbctcccgaccctcctcccggcaccgcaaccgggttcctgmgcccccgccgggcaggmccctagctactccccacagasgccgtttccctcccgaccccgcactcacctgcccaggtctgggtcaggaccagggcccccgagagcagcagaagcagggttcggggcgccatgacaccatcctcggcgactgggragaatcggagtcccggtgggtgcgtgggaactttagaaccgggaccgcggctacattgattggcttctctagraacccgacactcaatgggagtgagaactggggcagcckggtgagtakccaggaagaaggacccgacacaggttgggagagggagaagagaaaccctgcrragatggggaatscccagcgctgggcctccccaatccatacaccgcctttggggcctgagatcctgagagccakgcctgaggccctgggacttcgccctgaccccgctacttctgtgccaagcgctctgtctcaamgtttccgagtcttggcccaggagctgtctgagaaaccagggagaaaccctcgraatgggccccgtbcctctctcttcactttgcatcacggaatccccgtcccagaactggactccctgcctcctactccttacctgtccccgtggactcttctagaagaaaaatcacbccagggagcttgttgccagagagtgagcttgccctgggaatggaggtgtagagacagggttttttgttgttrttgtttgtttgttttttaaatctggaaaagttgtgcctgagtgcatgagatagaatagagaccagtttgctttttgtttattaactacagtgggtagcagaatcttggtaactcctratgatcaggaatctaatbggccaaaaatgtgactttggtcccttgacatataaatgtgtctaaaagcattacaacaggaatcacaaagctcctaagtttcactttyccagacaatgtatctgtgactcccgcttgtagtattttaaatttaccttcattccatagccctgagtttctgtgtgagtccaggacatctcctaatacaaggtagccactgtgttactatatgttgtaaccaggagccagtacrgactttattcahctcacagtggcaagcactcaatgcagtcacaatgcccctcaccagtgctcatgcactgcctgtttttaggaagtatccacttctaagtgttgtgtatattttatatgaacacttagtattttttaaacctgattaacataaaaaaattagtttttaggcagacccacataaggtattaaaggccaactgcaaagatcaccctgcaaggctctgtagattgatgtattaaaatatataaaacaatgtgtttaaacctg

SEQ ID NO: 41 - DNA, 1826 bp, Homo sapiens
  misc_feature (1)...(1826): n = A,T,C or G, or insertion/deletion polymorphism (see Tables 1-2)
mgcttggcacagragcagaggggtcagggcgaagtcccagggccccaggcgtggctctcagrgtctcaggccccgaaggcggtgtatggattggggagtcccagccttggggattccccaactccgcagtttcttttctccctctsccaacctatgtagggtccttcttcctggatactcacgacgcggacccagttctcactcccattgggtgtcgggtttccagagaagccaatcagtgtcgtcgcggtcgcggttctaaagyccgcacgcacccaccgggactcagattctccccagacgccgaggatggccrtcatgsckccccgaaccctcstcctgctactctygggggyyctggccctgacccagaccwgggcrggctcycactccatgaggtatttcwhcacmtccrtgtcccggcccggcmgyggrgagccccgcttcatcgcmgtgggctacgtggacgacwcgcagttcgtgcrgttygacagcgacgccgcgagccagargatggagccgcgggcaccgtggatagagcaggagrrkcckgagtattgggacsrgvasacasggaawrtsaaggcccaskcacagaytsaccgaghgracctgsggaccctgcgcggctactacaaccagagcgaggmcggttctcacaccrtccagakratgtwtggctgcgacgtggggycggackggcgcytcctccgcgggtaccrscagkacgcytacgacggcaaggattacatcgccytgaamgaggacctgcgctcttggaccgcggcggacatggcrgctcagaycaccmagcrcaagtgggagrcggyccrtshggcggagcagttgagagyctacctggakggcacgtgcgtggagtggctccgcagatacctggagaacgggaaggagacgctgcagcgcacggacgcccccaaracrcatatgacycaccacscyrtctctgaccatgargccacyctgagrtgctgggccctgrgcttctaccctgcggagatcacactgacctggcagcgggatggggaggaccagacccaggacacggagctygtggagaccaggcctgcaggggatggraccttccagaagtgggygkctgtggtggtrccttctggavaggagmagagatacacctgccatgtgcagcatgagggtytgcccaagcccctcaccctgagatgggagcygtcttcccagcccaccrtccccatcgtgggcatcattgctggcctrgttctctttggagctrtgwtcrctggagctgtggtcgctgctgtgaggtggaggaggaagagctcagatagaaaaggagggagctactctcaggctgcaagcagtgacagtgcccagggctctgatrtgtcyctcacagcttgtaaagtgtgagacagctgccttgtgtgggactgagaggcaagakttgttcctgcccttccctttgtgrcttgaagwaccctgactttgtttctgcaaaggcacctgcatgtgtctgtgttcntgtaggcataatgtgaggaggtggggagascacccmaccccsatgtccaccatgaccctcttcccacgctgacctgtgctccctcyccaatcatctttcctgttscagagaggtggggctgaggtgtctccatctctgyctcaacttcatggtgcactgagctgtaacttyttccttccctattaaaattagaacctkagtataaatttmctttctcaaattcttgccatgagaggttgatgagttaattaaaggagaagattcctaaaatttgagagacaaaatwaatggaasrcatgagaacctt

SEQ ID NO: 42 - DNA, 1567 bp, Homo sapiens
mgcttggcacagragcagaggggtcagggcgaagtcccagggccccaggcgtggctctcagrgtctcaggccccgaaggcggtgtatggattggggagtcccagccttggggattccccaactccgcagtttcttttctccctctsccaacctatgtagggtccttcttcctggatactcacgacgcggacccagttctcactcccattgggtgtcgggtttccagagaagccaatcagtgtcgtcgcggtcgcggttctaaagyccgcacgcacccaccgggactcagattctccccagacgccgaggatggccrtcatgsckccccgaaccctcstcctgctactctygggggyyctggccctgacccagaccwgggcrggctcycactccatgaggtatttcwhcacmtccrtgtcccggcccggcmgyggrgagccccgcttcatcgcmgtgggctacgtggacgacwcgcagttcgtgcrgttygacagcgacgccgcgagccagargatggagccgcgggcaccgtggatagagcaggagrrkcckgagtattgggacsrgvasacasggaawrtsaaggcccaskcacagaytsaccgaghgracctgsggaccctgcgcggctactacaaccagagcgaggmcggttctcacaccrtccagakratgtwtggctgcgacgtggggycggackggcgcytcctccgcgggtaccrscagkacgcytacgacggcaaggattacatcgccytgaamgaggacctgcgctcttggaccgcggcggacatggcrgctcagaycaccmagcrcaagtgggagrcggyccrtshggcggagcagttgagagyctacctggakggcacgtgcgtggagtggctccgcagatacctggagaacgggaaggagacgctgcagcgcacggacgcccccaaracrcatatgacycaccacscyrtctctgaccatgargccacyctgagrtgctgggccctgrgcttctaccctgcggagatcacactgacctggcagcgggatggggaggaccagacccaggacacggagctygtggagaccaggcctgcaggggatggraccttccagaagtgggygkctgtggtggtrccttctggavaggagmagagatacacctgccatgtgcagcatgagggtytgcccaagcccctcaccctgagatgggagcygtcttcccagcccaccrtccccatcgtgggcatcattgctggcctrgttctctttggagctrtgwtcrctggagctgtggtcgctgctgtgaggtggaggaggaagagctcagatagaaaaggagggagctactctcaggctgcaagcagtgacagtgcccagggctctgatrtgtcyctcacagcttgtaaagtgtgagacagctgccttgtgtgggactgagaggcaagakttgttcctgcccttccctttgtgrcttgaagwaccctgactttgtttctgcaaaggcaccttccaccatgaccctcttcccacgctgacctgtgctccctcyccaatcatctttcctgttscagag

SEQ ID NO: 43 - DNA, 979 bp, Homo sapiens
cacgccactccctgcgccagcttctgctttccgkcgtggctgtggtcaagcctgagtcagtcccacgggaccacgccgctgcagtcgccacacctttgcccctgctgcgatgaccctgtcgccacttctgctgttcctgccaccgctgctgctgctgctggacgtccccacggcggcggtgcaggcgtcccctctgcaagcgttagacttctttgggaatgggccaccagttaactacaagacaggcaatctatacctgcrggggcccctgaagaagtccaatgcaccgcttgtcaatgtgaccctctactatgaagcactgtgsggtggctgccgagccttcctgatccgggagctcttcccaacatggctgttggtcatggagatcctcaatgtcacgctggtgccctacggaaacgcacaggaacaaaatgtcagtggcaggtgggagttcaagtgccagcatggagakgaggagtgcaaattcaacaaggtggagtgcctgcagctctacgccccagggctgtcgccagacactatcatggagtgtgcaatgggggaccgcggcatgragctcatgcacgccaacgcccagcggacagatgctctccagccaccacacgagtatgtgccctgrgtcaccgtcaatgggaaacccttggaagatcagacccagctccttacccttgsytgccagttgtaccagggcaagaagccggatgtctgcccttcctcaaccagctccctcaggagtgtttgcttcaagtgatggccggtgagctgcggagagctcatggaaggcgagtgggaacccggctgcktgcctttttttctgatccagaccctcggcacctgctacttaccaactggaaaatrttatgcatcccrtgaagcccagatacacaaaattccaccccatgatcaagaatcmtgctccactaagaatggtgctaaagtaaaactygtttaataagccctt

SEQ ID NO: 44 - DNA, 1542 bp, Homo sapiens
cacgccactccctgcgccagcttctgctttccggcgtggctgtggtcaagcctgagtcagtcccacgggaccacgccgctgcagtcgccacacctttgcccctgctgckatgaccctgtcgccacttctgctgttcctgccaccgctgctgctgctgctggacgtccccacggcggcggtgcaggcgtcccctctgcaagcgttagacttctttgggaatgggccaccagttaactacaagacaggcaatctatacctgcgggggcccctgaagaagtccaatgcaccgcttgtcaatgtgaccctctactatgaagcactgtgcggtggctgccragccttcctgatccgggagctcttcccaacatggctgttggtcatggagatcctcaatgtcacsctggtgccctacggaaacgcacaggaacaaaatgtcagtggcaggtgggagttcaagtgccagcatggagaagaggagtgcaaattcaacaaggtggaggcctgcgtgttggatgaacttgacatggagctagccttcctgaccatkgtctgcatggaagagtttgaggacatggagagaagtctgccactatgcctgcagctctacgccccagggctgtcgccagacactatcatggagtgtgcartgggggaccgcggcatgcagctcatgcacgccaacgcccagcggacagatgctctccagccaccrcacgagtatgtgccctgggtcaccgtcaatggggtaagaatctttttagcccsyagcttgacactcatagtcccatggagtcagggatggacaagacagagggaccagagataaaggaacccaggcggaggttgcagtgagctgagatcatgccactgcactccagcctgggcaacaagagcakaacttgatagctttgcatagggaaagagggcattgatgctggggttttgaaaggtgygtaggagtccatcaggcaaaaaaagtatgtattaattcgaagtattaaacatccctagccacccccattgggaaagatgtgccactgatttgcgaggcgggaggcgggggccagacttgggaatatgtgcagccctttctgggctggaaccagggtgcatgggttggggtagctgctgggaatatgcgacccctgtcttgctttgtgcagaaacccttggaagatcagacccagctccttacccttgtctgccagttgtaccaggtaagctgggaggggagcagtgggattcaggtggtgggggtagggtctccttccaggaccccaactcatggccttcacctccagggcaagaagccggatgtctgcccttcctcaaccagctccctcaggagtgtttgcttcaagtgatggccggtgagctgcggagagctcatggaaggcgagtgggaacccggctgcctgcctttttttctgatccagaccctcggcacctgctacttaccaactggaaaattttatgcatcccatgaagcccagatacacaaaattccaccccatgatcaagaatcctgctccactaagaatg

SEQ ID NO: 45 - DNA, 1072 bp, Homo sapiens
cacgccactccctgcgccagcttctgctttccggcgtggctgtggtcaagcctgagtcagtcccacgggaccacgccgctgcagtcgccacacctttgcccctgctgckatgaccctgtcgccacttctgctgttcctgccaccgctgctgctgctgctggacgtccccacggcggcggtgcaggcgtcccctctgcaagcgttagacttctttgggaatgggccaccagttaactacaagacaggcaatctatacctgcgggggcccctgaagaagtccaatgcaccgcttgtcaatgtgaccctctactatgaagcactgtgcggtggctgccragccttcctgatccgggagctcttcccaacatggctgttggtcatggagatcctcaatgtcacsctggtgccctacggaaacgcacaggaacaaaatgtcagtggcaggtgggagttcaagtgccagcatggagaagaggagtgcaaattcaacaaggtggaggcctgcgtgttggatgaacttgacatggagctagccttcctgaccatkgtctgcatggaagagtttgaggacatggagagaagtctgccactatgcctgcagctctacgccccagggctgtcgccagacactatcatggagtgtgcartgggggaccgcggcatgcagctcatgcacgccaacgcccagcggacagatgctctccagccaccrcacgagtatgtgccctgggtcaccgtcaatgggaaacccttggaagatcagasycagctccttacccttgtctgccagttgtaccagggcaagaagccggatgtctgcccttcctcaaccagctccctcaggagtgtttgcttcaagtgatggccggtgagctgcggagagctcatggaaggckagtgggaacccggctgcctgcctttttttctgatccagaccctcggcacctgctrcttaccaactgraaaattttatgcatcccatgaagcccagatacacaaaattccmccccatgatcaagaatcctgctccactaagaayggtgctaaagtaaaactagtttaataagccctt

SEQ ID NO: 46 - DNA, 2172 bp, Homo sapiens
tgacaaaatgagtcccagcatgctacatctggtttcgggttttattttagaatttataaaattccagtgtcatccatattcatgagcctttacacatgtttgcatataatctccaaattccaaagttaaggccaagggatggattgtagctatggaaacagatgatatggaagacatccaacaaggaggaaaagcacacgcacgcctcacccctgcctcatctctgcccagggctgtcctgacagcacagacgcttcagggagacaggcctggggacagtcatgtcatcacccttgcaacaaccacccaaaggaaaagagagcgctgaacagtttaggaaagggctcgcgtctaagacatcaagcgacatacagagatgtgcaaaacttggtgagaattaaaattgacctttgggagagggtaggggcaggatgttttatgacactgtagaaaagacaggaggaaccygctgcgatggagattgsggggagctggaagcaagcagccaacaggacagagttccagaactcatgcagatggggaagaggtgacagcccttccccactggcctcccccgtggaggtggagtagacagatcccgggaaaggcaggaaaagggccttgctttctttccctgtttcctaagccgtggtcacccyagcctatgaagctggaagctatattccttccaatcccaatttaccattcctgtaaacaggcccattcagggctgcctgagcaaatggggacttgccgaggcagctgcaactagacttgggctaagccgtctgggtctactcaagaattcgmgtctgaagatgaccaagcttgagttattcaactgagagtgaggtgtcaaggcggaagcgactgtccccagggaagggctgtgagatggatgggcgtgagtcagcttttccaaaactcaagtacctgggacaggacaactcrctagcagctcagtcacctccgtggcggacacagataaggatgttaagaccagaaaaccagagactagggccccgtcctcagccctcacagcatgacacagatgcctccctcggagagcagggtctctcggcatccagcggcgtggtctgcattctgctctacctcatgctctaggccccatgccatcgtctcggccctagaccrtgaaaactgccagtcacccgggacctgctcctaggggctggcctgcacagccggatggcctgtgggcggggtggaagtgcccactcccactccagatgggcctgctggccactgacccacctgtgctgagggagagcgccagcctccagcttaggtacacggcgcccacccccagctccacgggaaacccataaccaccagaaacatctcaatcaagagacgggtgtgtggggtggcactaactgcacagagaccactccacgccggctgaggtagaaagaaggcaactgaacacacagcagctagggcaggggcagggaggggctgcaggtggtgtgaagaagagcccagctgtcatctaaggcaaactgcccccactgaggacaagcgtaaggccctacctcccccaacctgtgcgcatctcaatcacagcagacactgtgacggccacaggggacccagatggtgcctaccaccttgcctccaggctccactcaccagacctcaggctgagggtctggcagtggaggtaggggcagggacccttggtgctttcagaccccacggcaggtaaaatcaggactgcctgagaacccgtcaccctctgcctctcaggtcaccccccagctccaggaacctgcctcctgctgtccattgccaggtcttccttgcaccctgacacctgtgctgaggcgctctggcagctggaggaggctgattgcactccacaaacaggactgtctggaccaagggaaactggcaggagggaggtgggaaaggaagagggcaaacgtttggcttttataaagtcaaggacgtttatttcctgaggtcatgacacaggaagtggaatcctagccacggctgcggagctctcgtgatgaaggccagagtgctgactgacatgccgggtggaccaggagctggagtctgttatcttagcacgaatgctcatgaccttggtttagtgttaaacagtggagcaggtcctgagcgggcacggccaggcctggagga

SEQ ID NO: 47 - DNA, 1821 bp, Homo sapiens
tacatctggtttcgggttttattttagaatttataaaattccagtgtcatccatattcatgagcctttacacatgtttgcatataatctccaaattccaaagttaaggccaagggatggattgtagctatggaaacagatgatatggaagacatccaacaaggaggaaaagcacacgcacgcctcacccctgcctcatctctgcccagggctgtcctgacagcacagacgcttcagggagacagatcccgggaaaggcaggaaaagggccttgctttctttccctgtttcctaagccgtggtcacccyagcctatgaagctggaagctatattccttccaatcccaatttaccattcctgtaaacaggcccattcagggctgcctgagcaaatggggacttgccgaggcagctgcaactagacttgggctaagccgtctgggtctactcaagaattcgmgtctgaagatgaccaagcttgagttattcaactgagagtgaggtgtcaaggcggaagcgactgtccccagggaagggctgtgagatggatgggcgtgagtcagcttttccaaaactcaagtacctgggacaggacaactcrctagcagctcagtcacctccgtggcggacacagataaggatgttaagaccagaaaaccagagactagggccccgtcctcagccctcacagcatgacacagatgcctccctcggagagcagggtctctcggcatccagcggcgtggtctgcattctgctctacctcatgctctaggccccatgccatcgtctcggccctagaccrtgaaaactgccagtcacccgggacctgctcctaggggctggcctgcacagccggatggcctgtgggcggggtggaagtgcccactcccactccagatgggcctgctggccactgacccacctgtgctgagggagagcgccagcctccagcttaggtacacggcgcccacccccagctccacgggaaacccataaccaccagaaacatctcaatcaagagacgggtgtgtggggtggcactaactgcacagagaccactccacgccggctgaggtagaaagaaggcaactgaacacacagcagctagggcaggggcagggaggggctgcaggtggtgtgaagaagagcccagctgtcatctaaggcaaactgcccccactgaggacaagcgtaaggccctacctcccccaacctgtgcgcatctcaatcacagcagacactgtgacggccacaggggacccagatggtgcctaccaccttgcctccaggctccactcaccagacctcaggctgagggtctggcagtggaggtaggggcagggacccttggtgctttcagaccccacggcaggtaaaatcaggactgcctgagaacccgtcaccctctgcctctcaggtcaccccccagctccaggaacctgcctcctgctgtccattgccaggtcttccttgcaccctgacacctgtgctgaggcgctctggcagctggaggaggctgattgcactccacaaacaggactgtctggaccaagggaaactggcaggagggaggtgggaaaggaagagggcaaacgtttggcttttataaagtcaaggacgtttatttcctgaggtcatgacacaggaagtggaatcctagccacggctgcggagctctcgtgatgaaggccagagtgctgactgacatgccgggtggaccaggagctggagtctgttatcttagcacgaatgctcatgaccttggtttagtgttaaacagtggagcaggtcctgagcgggcacggccaggcctggagga

SEQ ID NO: 48 - DNA, 14745 bp, Homo sapiens
cagcggtgcgagctccaggcccatgcactgaggaggcggaaacaaggggagcccccagagctccatcaagccccctccaaaggctcccctacccggtccacgccccccaccccccctccccgcctcctcccaattgtgcatttttgcagccggaggcggctccgagatggggctgtgagcttcgcccggggagggggaaagagcagcgaggagtgaagcgggggggtggggtgaagggtttggatttcggggcagggggcgcacccccgtcagcaggccctccccaaggggctcggaactctacctcttcacccacgcccctggtgcgctttgccgaaggaaagaataagaacagagaaggaggagggggaaaggaggaaaagggggaccccccaactggggggggtgaaggagagaagtagcaggaccagaggggaaggggctgctgcttgcatcagcccacaccatgctgaccccgccgttgctcctgctgctgcccctgctctcagctctggtcgcggcggctatcgacgcccctaagacttgcagccccaagcagtttgcctgcagagatcaaataacctgtatctcaaagggctggcggtgcgacggtgagagggactgcccagacggatctgacgaggcccctgagatttgtccacagagtaaggcccagcgatgccagccaaacgagcataactgcctgggtactgagctgtgtgttcccatgtcccgcctctgcaatggggtccaggactgcatggayggctcagatgaggggccccactgccgagagctccaaggcaactgctctcgcctgggctgccagcaccattgtgtccccacactcgatgggcccacctgctactgcaacagcagctttcagcttcaggcagatggcaagacctgcaaagattttgatgagtgctcagtgtacggcacctgcagccagctatgcaccracacagacggctccttcatatgtggctgtgttgaaggatacctcctgcagccggataaccgctcctgcaaggccaagaacgagccagtagaccggccccctgtgctgttgatagccaactcccagaacatcttggccacgtacctgagtggggyccaggtgtctaccatcacacctacgagcacgcggcagaccacagccatggacttcagctatgccaacgagaccgtatgctgggtgcatgttggggacagtgctgctcagacrcagctcaagtgtgcccgcatgcctggcctaaagggcttcgtggatgagcacaccatcaacatctccctcagtctgcaccacgtggaacagatggccatcgactggctgacaggcaacttctactttgtggatgacatcgatgataggatctttgtctgcaacagaaatggggacacatgtgtcacattgctagacctggaactctacaaccccaagggcattgccctggaccctgccatggggaaggtgtttttcactgactatgggcagatcccaaaggtggaacgctgtgacatggatgggcagaaccgcaccaagctcgtcgacagcaagattgtgtttccycatggcatcacgctggacctggtcagccgccttgtctactgggcagatgcctatctggactatattgaagtggtggactatgagggcaagggccgccagacyatcatccagggcatcctgattgagcacctgtacggcctgactgtgtttgagaattatctctatgccaccaactcggacaatgccaatgcccagcagaagacgagtgtgatccgtgtgaaccgctttaacagcaccgagtaccaggttgtcacccgggtggacaagggtggtgccctccacatctaccaccagaggcgtcagccccgagtgaggagccatgcctgtgaaaacgaccagtatgggaagccgggtggctgctctgacatctgcctgctggccaacagccacaaggcgcggacctgccgctgccgttccggcttcagcctgggcagtgacgggaagtcatgcaagaagccggagcatgagctgttcctcgtgtatggcaagggccggccaggcatcatccggggcatggatatgggggccaaggtcccggatgagcacatgatccccattgaaaacctcatgaacccccgagccctggacttccacgctgagaccggcttcatctactttgccgacaccaccagctacctcattggccgccagaagattgatggcactgagcgggagaccatcctgaaggacggcatccacaatgtggagggtgtggccgtggactggatgggagacaatctgtactggacggacgatgggcccaaaaagacaatcagcgtggccaggctggagaaagctgctcagacccgcaagactttaatcgagggcaaaatgacacaccccagggctattgtggtggatccactcaatgggtggatgtactggacagactgggaggaggaccccaaggacagtcggcgtgggcggctggagagggcgtggatggatggctcacaccgagacatctttgtcacctccaagacagtgctttggcccaatgggctaagcctggacatcccggctgggcgcctctactgggtggatgccttctacgaccgcatcgagacgatactgctcaatggcacagaccggaagattgtgtatgaaggtcctgagctgaaccacgcctttggcctgtgtcaccatggcaactacctcttctggactgagtatcggagtggcagtgtctaccgcttggaacggggtrtaggaggcscaccccccactgtgacccttctgcgcagtgagcggccccccatctttgagatccgaatgtatgatgcccagcagcagcaagttggcaccaacaaatgccgggtgaacaatggcggctgcagcagcctgtgcttggccacccctgggagccgccagtgcgcctgtgctgaggaccaggtgttggacgcagacggcgtcacttgcttggcgaacccatcctacgtgcctccaccccagtgccagccaggcgagtttgcctgtgccaacagccgctgcatccaggagcgctggaagtgtgacggagacaacgattgcctggacaacagtgatgaggccccagccctctgccatcagcacacctgcccctcggaccgattcaagtgcgagaacaaccggtgcatccccaaccgctggctctgcgacggggacaatgactgtgggaacagtgaagatgagtccaatgccacttgttcagcccgcacctgcccccccaaccagttctcctgtgccagtggccgctgcatccccatctcctggacgtgtgatctggatgacgactgtggggaccgctctgatgagtctgcttcgtgtgcctatcccacctgcttccccctgactcagtttacctgcaacaatggcagatgtatcaacatcaactggagatgcgacaatgacaatgactgtggggacaacagtgacgaagccggctgcagccactcctgttctagcacccagttcaagtgcaacagcgggcgttgcatccccgagcactggacctgcgatggggacaatgactgcggagactacagtgatgagacacacgccaactgcaccaaccaggccacgaggccccctggtggctgccacactgatgagttccagtgccggctggatggactatgcatccccctgcggtggcgctgcgatggggacactgactgcatggactccagcgatgagaagagytgtgagggagtgacccacgtctgcgatcccagtgtcaagtttggctgcaaggactcagctcggtgcatcagcaaagcgtgggtgtgtgatggcgacaatgactgtgaggataactcggacgaggagaactgcgagtccctggcctgcaggccaccctcgcacccttgtgccaacaacacctcagtctgcctgccccctgacaagctgtgtgatggcaacgacgactgtggcgacggctcagatgagggcgagctctgygaccagtgctctctgaataacggtggctgcagccacaactgctcagtggcacctggcgaaggcattgtgtgttcctgccctctgggcatggagctggrgcccgacaaccacacctgccagatccagagctactgtgccaagcatctcaaatgcagccaaaagtgcgaccagaacaagttcagcgtgaagtgctcctgctacgagggctgggtcctggaacctgayggcgagagctgycgcagcctggaccccttcaagccgttcatcattttctccaaccgccatgaaatccggcgcatcgatcttcacaaaggagactacagcgtcctggtgcccggcctgcgcaacaccatcgccctggacttccacctcagccagagcgccctctactggaccgacgtggtggaggacaagatctaccgcgggaagctgctggacaacggagccctgactagtttcgaggtggtgattcagtatggcctggccacacccgagggcctggctgtagactggattgcaggcaacatctactgggtggagagtaacctggatcagatcgaggtggccaagctggatgggaccctccggaccaccctgctggccggtgacattgagcacccaagggcaatcgcactggatccccgggatgggatcctgttttggacagactgggatgccagcctgccccgcattgaggcagcctccatgagtggggctgggcgccgcaccgtgcaccgggagaccggctctgggggctggcccaaygggctcaccgtggactacctggagaagcgcatcctttggattgacgccaggtcagatgccatttactcagcccgttacgacggctctggccacatggaggtgcttcggggacacgagttcctgtcgcacccrtttgcagtgacgctgtacgggggggaggtctactggactgactggcgaacaaacacactggctaaggccaacaagtggaccggccacaatgtcaccgtggtacagaggaccaacacccagccctttgacctgcaggtgtaccacccctcccgccagcccatggctcccaatccctgtgaggccaatgggggccagggcccctgctcccacctgtgtctcatcaactacaaccggaccgtgtcctgcgcctgcccccacctcatgaagctccacaaggacaacaccacctgctatgagtttaagaagttcctgctgtacgcacgtcagatggagatccgaggtgtggacctggatgctccctactacaactacatcatctccttcacggtgcccgacatcgacaacgtcacagtgctagactacgatgcccrcgagcagcgtgtgtactggtctgacgtgcggacacaggccatcaagcgggccttcatcaacggcacaggcgtggagacagtcgtctctgcagacttgccaaatgcccacgggctggctgtggactgggtctcccgaaacctgttctggacaagctatgacaccaataagaagcagatcaatgtggcccggctggatggctccttcaagaacgcagtggtgcagggcctggagcagccccatggccttgtcgtccaccctctgcgtgggaagctctactggaccgatggtgacaacatcagcatggccaacatggatggcagcaatcgcaccctgctcttcagtggccagaagggccccgtgggcctggctattgacttccctgaaagcaaactctactggatcagctccgggaaccataccatcaaccgctgcaacctggatgggagtgggctggaggtcatcgatgccatgcggagccagctgggcaaggccaccgccctggccatcatgggggacaagctgtggtgggctgatcaggtgtcggaaaagatgggcacatgcagcaaggctgacggctcgggctccgtggtccttcggaacagcaccaccctggtgatgcacatgaaggtctatgacgagagcatccagctggaccataagggcaccaacccctgcagtgtcaacaacggtgactgctcccagctctgcctgcccacgtcagagacgacccgctcctgcatgtgcacagccggctatagcctccggagtggccagcaggcctgcgagggcgtaggttcctttctcctgtactctgtgcatgagggaatcaggggrattcccctggatcccaatgacaagtcagatgccctggtcccagtgtccgggacctcgctggctgtcggcatcgacttccacgctgaaaatgacaccatctactgggtggacatgggcctgagcacgatcagccgggccaagcgggaccagacgtggcgtgaagacgtggtgaccaatggcattggccgtgtggagggcattgcagtggactggatcgcaggcaacatctactggacagaccagggctttgatgtcatcgaggtcgcccggctcaatggctccttccgctacgtggtgatctcccagggtctagacaagccccgggccatcaccgtccacccggagaaagggtacttgttctggactgagtggggtcagtatccrcgtattgagcggtctcggctaratggcacggagcgtgtggtgctggtcaacgtcagcatcagctggcccaacggcatctcagtggactaccaggatgggaagctgtactggtgcgatgcacggacagacaagattgaacggatcracctggagacaggtgagaaccgcgaggtggttctgtccagcaacaacatggacatgttttcagtgtctgtgtttgaggatttcatctactggagtgacaggactcatgccaacggctctatcaagcgcgggagcaaagacaatgccacagactccgtgcccctgcgaaccggcatcggcgtccagcttaaagacatcaaagtcttcaaccgggaccggcagaaaggcaccaaygtgtgcgcggtggccaatggcgggtgccagcagctgtgcctgtaccggggccgtgggcagcgggcctgcgcctgtgcccacgggatgctggctgaagayggagcatcgtgccgygagtatgccggctacctgctctactcagagcgcaccattctcaagagtatccacctgtcggatgagcgcaacctcaatgcgcccgtgcagcccttcgaggaccctgagcacatgaagaacgtcatcgccctggcctttgactaccgggcaggcacctctccgggcacccccaatcgcatcttcttcagcgacatccactttgggaacatccaacagatcaacgacgatggctccaggaggatcaccattgtggaaaacgtgggctccgtggaaggcctggcctatcaccgtggctgggacactctctattggacaagctacacgacatccaccatcacgcgccacacagtggaccagacccgcccaggggccttcgagcgtgagaccgtcatcactatgtctggagatgaccacccacgggccttcgttttggacgagtgccagaacctcatgttctggaccaactggaatgagcagcatcccagcatcatgcgggcggcgctctcgggagccaatgtcctgacccttatcgagaaggacatccgtacccccaatggcctggccatcgaccaccgtgccgagaagctctacttctctgacgccaccctggacaagatcgagcggtgcgagtatgacggctcccaccgctatgtgatcctaaagtcagagcctgtccaccccttcgggctggcygtgtatggggagcacattttctggactgactgggtgcggcgggcagtgcagcgggccaacaagcacgtgggcagcaacatgaagctgctgcgcgtggacatcccccagcagcccatgggcatcatcgcygtggccaacgacaccaacagctgtgaactctctccatgccgaatcaacaacggtggctgccaggacctgtgtctgctcactcaccagggccatgtcaactgctcatgccgagggggccgaatcctccaggatgacctcacctgccgagcggtgaattcctcttgccgagcacaagatgagtttgagtgtgccaatggcgagtgcatcaacttcagcctgacctgcgacggcgtcccccactgcaaggacaagtccgatgagaagccatcctactgcaactcccgccgctgcaagaagactttccggcagtgcagcaatgggcgctgtgtgtccaacatgctgtggtgcaacggggccgacgactgtggggatggctctgacgagatcccttgcaacaagacagcctgtggtgtgggcgagttccgctgccgggacgggacctgcatcgggaactccagccgctgcaaccagtttgtggattgtgaggacgcctcagatgagatgaactgcagtgacttcgcctgccctagtgggcgctgcatccccatgagctggacrtgtgacaaagaggatgactgtgaacatggcgaggacgagacccactgcaacaagttctgctcagaggcccagtttgagtgccagaaccatcgctgcatctccaagcagtggctgtgtgayggcagcgatgactgtggggatggctcagacgaggctgctcactgtgaaggcaagacgtgyggcccctcctccttctcctgccctggcacccacgtgtgcgtccccgagcgctggctctgtgacggtgacaaagactgtgctgatggtgcagacgagagcatcgcagctggttgcttgtayaacagcacttgtgacgaccgtgagttcatgtgccagaaccgccagtgcatccccaagcacttcgtgtgtgaccacgaccgtgactgtgcagatggctctgatgagtcccccgagtgtgagtacccgacctgyggccccagtgagttccgctgtgccaatgggcgctgtctgagctcccgccagtgggagtgtgatggcgagaatgactgccacgaccagagtgaygaggctcccaagaacccacactgcaccagccmagagcacaagtgcaatgcctcgtcacagttcctgtgcagcagtgggcgctgtgtggctgaggcactgctctgcaacggccaggatgactgtggcgacagctcggaygagcgtggctgccacatcaatgagtgtctcagccgcaagctcagtggctgcagccaggactgtgaggacctcaagatcggcttcaagtgccgctgtcgccctggcttccggctgaaggaygacggccggacgtgtgctgatgtggacgagtgcagcaccaccttcccctgcagccagcgctgcatcaacacycatggcagctataagtgtctgtgtgtggagggctatgcaccccgcggcggcgacccccacagctgcaaggctgtgactgacgaggaaccgtttctgatcttcgccaaccggtactacctgcgcaagctcaacctggacgggtccaactacacgttacttaagcagggcctgaacaacgccgttgccttggattttgactaccgagagcagatgatctactggacagatgtgaccacccagggcagcatgatccgaaggatgcaccttaacgggagcaatgtgcaggtcctacaccgtacaggcctcagcaaccccgatgggctggctgtggactgggtgggtggcaacctgtactggtgcgacaaaggccgggacaccatcgaggtgtccaagctcaatggggcctatcggacggtgctggtcagctctggcctccgtgagcccagggctctggtggtggatgtgcagaatgggtacctgtactggacagactggggtgaccattcactgatcggccgcatcggcatggatgggtccagccgcagcgtcatcgtggacaccaagatcacatggcccaatggcctgacgctggactatgtcactgagcgcatctactgggccgacgcccgcgaggactacattgaatttgccagcctggatggctccaatcgccacgttgtgctgagccaggacatcccgcacatctttgcactgaccctgtttgaggactacgtctactggaccgactgggaaacaaagtccattaaccgagcccacaagaccacrggcaccaacaaaacgctcctcatcagcacgctgcaccggcccatggacctgcatgtcttccatgccctgcgccagccagacgtgcccaatcacccctgcaaggtcaacaatggtggctgcagcaacctgtgcctgctgtcccccgggggagggcacaaatgtgcctgccccaccaacttctacctgggcagcgatgggcgcacctgtgtgtccaactgcacggctagccagtttgtatgcaagaacgacaagtgcatccccttctggtggaagtgtgacaccgaggacgactgcggggaccactcagacgagcccccggactgccctgagttcaagtgccggcccggacagttccagtgctccacaggtatctgcacaaaccctgccttcatctgcgatggcgacaatgactgccaggacaacagtgacgaggccaactgtgacatccacgtctgcttgcccagtcagttcaaatgcaccaacaccaaccgctgtattcccggcatcttccgctgcaatgggcaggacaactgcggagatggggaggatgagagggactgccccgaggtgacctgcgcccccaaccagttccagtgctccattaccaaacggtgcatcccccgggtctgggtctgcgaccgggacaatgactgtgtggatggcagtgatgagcccgccaactgcacccaratgacctgtggtgtggacgagttccgctgcaaggattcgggccgctgcatcccagcgcgttggaagtgtgacggagaggatgactgtggggatggctcggatgagcccaaggaagagtgtgatgaacgcacctgtgagccataccagttccgctgcaagaacaaccgctgcgtgcccggccgctggcagtgcgactacgacaacgattgcggtgacaactccgatgaagagagctgcacccctcggccctgctcygagagtgagttctcctgtgccaacggccgctgcatcgckgggcgctggaaatgcgatggagaccacgactgcgcggacggctcggacgagaaagactgcaccccccgctgtgacatggaccagttccagtgcaagagcggccactgcatccccctgcgctggcgctgtgacgcagacgccgactgcatggacggcagcgacgaggaggcctgcggcactggcgtgcggacctgccccctggacgagttccagtgcaacaacaccttgtgcaagccgctggcctggaagtgcgatggcgaggatgactgtggggacaactcagatgagaaccccgaggagtgtgcccggttcgtgtgccctcccaaccggcccttccgttgcaagaatgaccgcgtctgtctgtggatcgggcgccaatgcgatggcacggacaactgtggggatgggactgatgaagaggactgtgagccccccacagcccacaccacccactgcaaagacaagaaggagtttctgtgccggaaccagcgctgcctctcctcctccctgcgctgcaacatgttcgatgactgcggggacggctctgacgaggaggactgcagcatcgaccccaagctgaccagctgcgccaccaatgccagcatctgtggggacgaggcacgctgcgtgcgcaccgagaaagcggcctactgtgcctgccgctcgggcttccacaccgtgcccggccagcccggatgccaagacatcaacgagtgcctgcgcttcggcacctgctcccagctctgcaacaacaccaagggcggccacctctgcagctgcgctcggaacttcatgaagacgcacaacacctgcaaggccgaaggctctgagtaccaggtcctgtacatygctgatgacaatgagatccgcagcctgttcccyggccacccccattcggcttacgagcaggcattccagggtgacgagagtgtccgcattgatgctatggatgtccatgtcaaggctggccgtgtctattggaccaactggcacacgggcaccatctcctaccgcagcctgccacctgctgcgcctcctaccacttccaaccgccaccggcgacagattgaccggggtgtcacccacctcaacatttcagggctgaagatgcccagaggcatcgccatcgactgggtggccggaaacgtgtactggaccgactcgggccgagatgtgattgaggtggcgcagatgaagggcgagaaccgcaagacgctcatctcgggcatgattgacgagccccacgccattgtggtggacccactgagggggaccatgtactggtcagactggggcaaccaccccaagattgagacggcagcgatggatgggacgcttcgggagacactggtgcaggacaacattcagtggcccacaggcctggccgtggattatcacaatgagcggctgtactgggcagacgccaagctttcagtcatcggcagcatccggctcaatggcacggaccccattgtggctgctgacagcaaacgaggcctaagtcaccccttcagcatcgacgtctttgaggattacatctatggtgtcacctacatcaataatcgtgtcttcaagatccataagtttggccacagccccttggtcaacctgacagggggcctgagccacgcctctgacgtggtcctttaccatcagcacaagcagcccgaagtgaccaacccatgtgaccgcaagaaatgcgagtggctctgcctgctgagccccagtgggcctgtctgcacctgtcccaatgggaagcggctggacaacggcacatgcgtgcctgtgccctctccaacgccccccccagatgctccccggcctggaacctgtaacctgcagtgcttcaacggtggcagctgtttcctcaatgcacggaggcagcccaagtgccgctgccaaccccgctacacgggtgacaagtgtgaactggaccagtgctgggagcactgtcgcaatgggggcacctgtgctgcctccccctctggcatgcccacgtgccggtgccccacgggcttcacgggccccaaatgcacccagcaggtgtgtgcgggctactgtgccaacaacagcacctgcactgtcaaccagggcaaccagccccagtgccgatgcctacccggcttcctgggcgaccgctgccagtaccggcagtgctctggctactgtgagaactttggcacatgccagatggctgctgatggctcccgacaatgccgctgcactgcctactttgagggatcgaggtgtgaggtgaacaagtgcagccgctgtctcgaaggggcctgtgtggtcaacaagcagagtggggatgtcacctgcaactgcacggatggccgggtggcccccagctgtctgacctgcgtcggccactgcagcaatggcggctcctgtaccatgaacagcaaaatgatgcctgagtgccagtgcccaccccacatgacagggccccggtgtgaggagcacgtcttcagccagcagcagccaggacatatagcctccatcctaatccctctgctgttgctgctgctgctggttctggtggccggagtggtattctggtataagcggcgagtccaaggggctaagggcttccagcaccaacggatgaccaacggggccatgaacgtggagattggaaaccccacctacaagatgtacgaaggcggagagcctgatgatgtgggaggcctactggacgctgactttgccctggaccctgacaagcccaccaacttcaccaaccccgtgtatgccacactctacatggggggccatggcagtcgccactccctggccagcacggacgagaagcgagaactcctgggccggggccctgaggacgagataggggaccccttggcatagggccctgccccgtcggactgcccccagaaagcctcctgccccctgccggtgaagtccttcagtgagcccctccccagccagcccttccctggccccgccggatgtataaatgtaaaaatgaaggaattacattttatatgtgagcgagcaagccggcaagcgagcacagtattatttctccatcccctccctgcctgctccttggcacccccatgctgccttcagggagacaggcagggagggcttggggctgcacctcctaccctcccaccagaacgcaccccactgggagagctggtggtgcagccttcccctccctgtataagacactttgccaaggctctcccctctcgccccatccctgcttgcccgctcccacagcttcctgagggctaattctgggaagggagagttctttgctgcccctgtctggaagacgtggctctgggtgaggtaggcgggaaaggatggagtkttttagttcttgggggaggccaccccaaaccccagccccaactccaggggcacctatgagatggccatgctcaacccccctcccagacaggccctccctgtctccagggcccccaccgaggttcccagggctggagacttcctctggtaaacattcctccagcctcccctcccctggggacgccaaggaggtgggccacacccaggaagggaaagcgggcagccccgttttggggacgtgaacgttttaataatttttgctgaattcctttacaactaaataacacagatattgttataaataaaattgtaaaaaaaaaaaaaaaaaaggccaaaaaaaaaaaaag

SEQ ID NO: 49 - DNA, 14538 bp, Homo sapiens
cagcggtgcgagctccaggcccatgcactgaggaggcggaaacaaggggagcccccagagctccatcaagccccctccaaaggctcccctacccggtccacgccccccaccccccctccccgcctcctcccaattgtgcatttttgcagccggaggcggctccgagatggggctgtgagcttcgcccggggagggggaaagagcagcgaggagtgaagcgggggggtggggtgaagggtttggatttcggggcagggggcgcacccccgtcagcaggccctccccaaggggctcggaactctacctcttcacccacgcccctggtgcgctttgccgaaggaaagaataagaacagagaaggaggagggggaaaggaggaaaagggggaccccccaactggggggggtgaaggagagaagtagcaggaccagaggggaaggggctgctgcttgcatcagcccacaccatgctgaccccgccgttgctcctgctgctgcccctgctctcagctctggtcgcggcggctatcgacgcccctaagacttgcagccccaagcagtttgcctgcagagatcaaataacctgtatctcaaagggctggcggtgcgacggtgagagggactgcccagacggatctgacgaggcccctgagatttgtccacagagtaaggcccagcgatgccagccaaacgagcataactgcctgggtactgagctgtgtgttcccatgtcccgcctctgcaatggggtccaggactgcatggayggctcagatgaggggccccactgccgagagctccaaggcaactgctctcgcctgggctgccagcaccattgtgtccccacactcgatgggcccacctgctactgcaacagcagctttcagcttcaggcagatggcaagacctgcaaagattttgatgagtgctcagtgtacggcacctgcagccagctatgcaccracacagacggctccttcatatgtggctgtgttgaaggatacctcctgcagccggataaccgctcctgcaaggccaagaacgagccagtagaccggccccctgtgctgttgatagccaactcccagaacatcttggccacgtacctgagtggggyccaggtgtctaccatcacacctacgagcacgcggcagaccacagccatggacttcagctatgccaacgagaccgtatgctgggtgcatgttggggacagtgctgctcagacrcagctcaagtgtgcccgcatgcctggcctaaagggcttcgtggatgagcacaccatcaacatctccctcagtctgcaccacgtggaacagatggccatcgactggctgacaggcaacttctactttgtggatgacatcgatgataggatctttgtctgcaacagaaatggggacacatgtgtcacattgctagacctggaactctacaaccccaagggcattgccctggaccctgccatggggaaggtgtttttcactgactatgggcagatcccaaaggtggaacgctgtgacatggatgggcagaaccgcaccaagctcgtcgacagcaagattgtgtttccycatggcatcacgctggacctggtcagccgccttgtctactgggcagatgcctatctggactatattgaagtggtggactatgagggcaagggccgccagacyatcatccagggcatcctgattgagcacctgtacggcctgactgtgtttgagaattatctctatgccaccaactcggacaatgccaatgcccagcagaagacgagtgtgatccgtgtgaaccgctttaacagcaccgagtaccaggttgtcacccgggtggacaagggtggtgccctccacatctaccaccagaggcgtcagccccgagtgaggagccatgcctgtgaaaacgaccagtatgggaagccgggtggctgctctgacatctgcctgctggccaacagccacaaggcgcggacctgccgctgccgttccggcttcagcctgggcagtgacgggaagtcatgcaagaagccggagcatgagctgttcctcgtgtatggcaagggccggccaggcatcatccggggcatggatatgggggccaaggtcccggatgagcacatgatccccattgaaaacctcatgaacccccgagccctggacttccacgctgagaccggcttcatctactttgccgacaccaccagctacctcattggccgccagaagattgatggcactgagcgggagaccatcctgaaggacggcatccacaatgtggagggtgtggccgtggactggatgggagacaatctgtactggacggacgatgggcccaaaaagacaatcagcgtggccaggctggagaaagctgctcagacccgcaagactttaatcgagggcaaaatgacacaccccagggctattgtggtggatccactcaatgggtggatgtactggacagactgggaggaggaccccaaggacagtcggcgtgggcggctggagagggcgtggatggatggctcacaccgagacatctttgtcacctccaagacagtgctttggcccaatgggctaagcctggacatcccggctgggcgcctctactgggtggatgccttctacgaccgcatcgagacgatactgctcaatggcacagaccggaagattgtgtatgaaggtcctgagctgaaccacgcctttggcctgtgtcaccatggcaactacctcttctggactgagtatcggagtggcagtgtctaccgcttggaacggggtrtaggaggcscaccccccactgtgacccttctgcgcagtgagcggccccccatctttgagatccgaatgtatgatgcccagcagcagcaagttggcaccaacaaatgccgggtgaacaatggcggctgcagcagcctgtgcttggccacccctgggagccgccagtgcgcctgtgctgaggaccaggtgttggacgcagacggcgtcacttgcttggcgaacccatcctacgtgcctccaccccagtgccagccaggcgagtttgcctgtgccaacagccgctgcatccaggagcgctggaagtgtgacggagacaacgattgcctggacaacagtgatgaggccccagccctctgccatcagcacacctgcccctcggaccgattcaagtgcgagaacaaccggtgcatccccaaccgctggctctgcgacggggacaatgactgtgggaacagtgaagatgagtccaatgccacttgttcagcccgcacctgcccccccaaccagttctcctgtgccagtggccgctgcatccccatctcctggacgtgtgatctggatgacgactgtggggaccgctctgatgagtctgcttcgtgtgcctatcccacctgcttccccctgactcagtttacctgcaacaatggcagatgtatcaacatcaactggagatgcgacaatgacaatgactgtggggacaacagtgacgaagccggctgcagccactcctgttctagcacccagttcaagtgcaacagcgggcgttgcatccccgagcactggacctgcgatggggacaatgactgcggagactacagtgatgagacacacgccaactgcaccaaccaggccacgaggccccctggtggctgccacactgatgagttccagtgccggctggatggactatgcatccccctgcggtggcgctgcgatggggacactgactgcatggactccagcgatgagaagagytgtgagggagtgacccacgtctgcgatcccagtgtcaagtttggctgcaaggactcagctcggtgcatcagcaaagcgtgggtgtgtgatggcgacaatgactgtgaggataactcggacgaggagaactgcgagtccctggcctgcaggccaccctcgcacccttgtgccaacaacacctcagtctgcctgccccctgacaagctgtgtgatggcaacgacgactgtggcgacggctcagatgagggcgagctctgygaccagtgctctctgaataacggtggctgcagccacaactgctcagtggcacctggcgaaggcattgtgtgttcctgccctctgggcatggagctggrgcccgacaaccacacctgccagatccagagctactgtgccaagcatctcaaatgcagccaaaagtgcgaccagaacaagttcagcgtgaagtgctcctgctacgagggctgggtcctggaacctgayggcgagagctgycgcagcctggaccccttcaagccgttcatcattttctccaaccgccatgaaatccggcgcatcgatcttcacaaaggagactacagcgtcctggtgcccggcctgcgcaacaccatcgccctggacttccacctcagccagagcgccctctactggaccgacgtggtggaggacaagatctaccgcgggaagctgctggacaacggagccctgactagtttcgaggtggtgattcagtatggcctggccacacccgagggcctggctgtagactggattgcaggcaacatctactgggtggagagtaacctggatcagatcgaggtggccaagctggatgggaccctccggaccaccctgctggccggtgacattgagcacccaagggcaatcgcactggatccccgggatgggatcctgttttggacagactgggatgccagcctgccccgcattgaggcagcctccatgagtggggctgggcgccgcaccgtgcaccgggagaccggctctgggggctggcccaaygggctcaccgtggactacctggagaagcgcatcctttggattgacgccaggtcagatgccatttactcagcccgttacgacggctctggccacatggaggtgcttcggggacacgagttcctgtcgcacccrtttgcagtgacgctgtacgggggggaggtctactggactgactggcgaacaaacacactggctaaggccaacaagtggaccggccacaatgtcaccgtggtacagaggaccaacacccagccctttgacctgcaggtgtaccacccctcccgccagcccatggctcccaatccctgtgaggccaatgggggccagggcccctgctcccacctgtgtctcatcaactacaaccggaccgtgtcctgcgcctgcccccacctcatgaagctccacaaggacaacaccacctgctatgagtttaagaagttcctgctgtacgcacgtcagatggagatccgaggtgtggacctggatgctccctactacaactacatcatctccttcacggtgcccgacatcgacaacgtcacagtgctagactacgatgcccrcgagcagcgtgtgtactggtctgacgtgcggacacaggccatcaagcgggccttcatcaacggcacaggcgtggagacagtcgtctctgcagacttgccaaatgcccacgggctggctgtggactgggtctcccgaaacctgttctggacaagctatgacaccaataagaagcagatcaatgtggcccggctggatggctccttcaagaacgcagtggtgcagggcctggagcagccccatggccttgtcgtccaccctctgcgtgggaagctctactggaccgatggtgacaacatcagcatggccaacatggatggcagcaatcgcaccctgctcttcagtggccagaagggccccgtgggcctggctattgacttccctgaaagcaaactctactggatcagctccgggaaccataccatcaaccgctgcaacctggatgggagtgggctggaggtcatcgatgccatgcggagccagctgggcaaggccaccgccctggccatcatgggggacaagctgtggtgggctgatcaggtgtcggaaaagatgggcacatgcagcaaggctgacggctcgggctccgtggtccttcggaacagcaccaccctggtgatgcacatgaaggtctatgacgagagcatccagctggaccataagggcaccaacccctgcagtgtcaacaacggtgactgctcccagctctgcctgcccacgtcagagacgacccgctcctgcatgtgcacagccggctatagcctccggagtggccagcaggcctgcgagggcgtaggttcctttctcctgtactctgtgcatgagggaatcaggggrattcccctggatcccaatgacaagtcagatgccctggtcccagtgtccgggacctcgctggctgtcggcatcgacttccacgctgaaaatgacaccatctactgggtggacatgggcctgagcacgatcagccgggccaagcgggaccagacgtggcgtgaagacgtggtgaccaatggcattggccgtgtggagggcattgcagtggactggatcgcaggcaacatctactggacagaccagggctttgatgtcatcgaggtcgcccggctcaatggctccttccgctacgtggtgatctcccagggtctagacaagccccgggccatcaccgtccacccggagaaagggtacttgttctggactgagtggggtcagtatccrcgtattgagcggtctcggctaratggcacggagcgtgtggtgctggtcaacgtcagcatcagctggcccaacggcatctcagtggactaccaggatgggaagctgtactggtgcgatgcacggacagacaagattgaacggatcracctggagacaggtgagaaccgcgaggtggttctgtccagcaacaacatggacatgttttcagtgtctgtgtttgaggatttcatctactggagtgacaggactcatgccaacggctctatcaagcgcgggagcaaagacaatgccacagactccgtgcccctgcgaaccggcatcggcgtccagcttaaagacatcaaagtcttcaaccgggaccggcagaaaggcaccaaygtgtgcgcggtggccaatggcgggtgccagcagctgtgcctgtaccggggccgtgggcagcgggcctgcgcctgtgcccacgggatgctggctgaagayggagcatcgtgccgygagtatgccggctacctgctctactcagagcgcaccattctcaagagtatccacctgtcggatgagcgcaacctcaatgcgcccgtgcagcccttcgaggaccctgagcacatgaagaacgtcatcgccctggcctttgactaccgggcaggcacctctccgggcacccccaatcgcatcttcttcagcgacatccactttgggaacatccaacagatcaacgacgatggctccaggaggatcaccattgtggaaaacgtgggctccgtggaaggcctggcctatcaccgtggctgggacactctctattggacaagctacacgacatccaccatcacgcgccacacagtggaccagacccgcccaggggccttcgagcgtgagaccgtcatcactatgtctggagatgaccacccacgggccttcgttttggacgagtgccagaacctcatgttctggaccaactggaatgagcagcatcccagcatcatgcgggcggcgctctcgggagccaatgtcctgacccttatcgagaaggacatccgtacccccaatggcctggccatcgaccaccgtgccgagaagctctacttctctgacgccaccctggacaagatcgagcggtgcgagtatgacggctcccaccgctatgtgatcctaaagtcagagcctgtccaccccttcgggctggcygtgtatggggagcacattttctggactgactgggtgcggcgggcagtgcagcgggccaacaagcacgtgggcagcaacatgaagctgctgcgcgtggacatcccccagcagcccatgggcatcatcgcygtggccaacgacaccaacagctgtgaactctctccatgccgaatcaacaacggtggctgccaggacctgtgtctgctcactcaccagggccatgtcaactgctcatgccgagggggccgaatcctccaggatgacctcacctgccgagcggtgaattcctcttgccgagcacaagatgagtttgagtgtgccaatggcgagtgcatcaacttcagcctgacctgcgacggcgtcccccactgcaaggacaagtccgatgagaagccatcctactgcaactcccgccgctgcaagaagactttccggcagtgcagcaatgggcgctgtgtgtccaacatgctgtggtgcaacggggccgacgactgtggggatggctctgacgagatcccttgcaacaagacagcctgtggtgtgggcgagttccgctgccgggacgggacctgcatcgggaactccagccgctgcaaccagtttgtggattgtgaggacgcctcagatgagatgaactgcagtgagtgacgccctttgctggcacctcctgggctcctccccatygctcactgcatctcccgccttcaggccctcctgcacctgcccacattcctctctgccttccctcatccccgctgacagcctccatctccctgaggccctgtccccatcccgctcctgctcctgggctctcgtgggtgggcgctgcatccccatgagctggacrtgtgacaaagaggatgactgtgaacatggcgaggacgagacccactgcaacaagttctgctcagaggcccagtttgagtgccagaaccatcgctgcatctccaagcagtggctgtgtgayggcagcgatgactgtggggatggctcagacgaggctgctcactgtgaaggcaagacgtgyggcccctcctccttctcctgccctggcacccacgtgtgcgtccccgagcgctggctctgtgacggtgacaaagactgtgctgatggtgcagacgagagcatcgcagctggttgcttgtayaacagcacttgtgacgaccgtgagttcatgtgccagaaccgccagtgcatccccaagcacttcgtgtgtgaccacgaccgtgactgtgcagatggctctgatgagtcccccgagtgtgagtacccgacctgyggccccagtgagttccgctgtgccaatgggcgctgtctgagctcccgccagtgggagtgtgatggcgagaatgactgccacgaccagagtgaygaggctcccaagaacccacactgcaccagccmagagcacaagtgcaatgcctcgtcacagttcctgtgcagcagtgggcgctgtgtggctgaggcactgctctgcaacggccaggatgactgtggcgacagctcggaygagcgtggctgccacatcaatgagtgtctcagccgcaagctcagtggctgcagccaggactgtgaggacctcaagatcggcttcaagtgccgctgtcgccctggcttccggctgaaggaygacggccggacgtgtgctgatgtggacgagtgcagcaccaccttcccctgcagccagcgctgcatcaacacycatggcagctataagtgtctgtgtgtggagggctatgcaccccgcggcggcgacccccacagctgcaaggctgtgactgacgaggaaccgtttctgatcttcgccaaccggtactacctgcgcaagctcaacctggacgggtccaactacacgttacttaagcagggcctgaacaacgccgttgccttggattttgactaccgagagcagatgatctactggacagatgtgaccacccagggcagcatgatccgaaggatgcaccttaacgggagcaatgtgcaggtcctacaccgtacaggcctcagcaaccccgatgggctggctgtggactgggtgggtggcaacctgtactggtgcgacaaaggccgggacaccatcgaggtgtccaagctcaatggggcctatcggacggtgctggtcagctctggcctccgtgagcccagggctctggtggtggatgtgcagaatgggtacctgtactggacagactggggtgaccattcactgatcggccgcatcggcatggatgggtccagccgcagcgtcatcgtggacaccaagatcacatggcccaatggcctgacgctggactatgtcactgagcgcatctactgggccgacgcccgcgaggactacattgaatttgccagcctggatggctccaatcgccacgttgtgctgagccaggacatcccgcacatctttgcactgaccctgtttgaggactacgtctactggaccgactgggaaacaaagtccattaaccgagcccacaagaccacrggcaccaacaaaacgctcctcatcagcacgctgcaccggcccatggacctgcatgtcttccatgccctgcgccagccagacgtgcccaatcacccctgcaaggtcaacaatggtggctgcagcaacctgtgcctgctgtcccccgggggagggcacaaatgtgcctgccccaccaacttctacctgggcagcgatgggcgcacctgtgtgtccaactgcacggctagccagtttgtatgcaagaacgacaagtgcatccccttctggtggaagtgtgacaccgaggacgactgcggggaccactcagacgagcccccggactgccctgagttcaagtgccggcccggacagttccagtgctccacaggtatctgcacaaaccctgccttcatctgcgatggcgacaatgactgccaggacaacagtgacgaggccaactgtgacatccacgtctgcttgcccagtcagttcaaatgcaccaacaccaaccgctgtattcccggcatcttccgctgcaatgggcaggacaactgcggagatggggaggatgagagggactgccccgaggtgacctgcgcccccaaccagttccagtgctccattaccaaacggtgcatcccccgggtctgggtctgcgaccgggacaatgactgtgtggatggcagtgatgagcccgccaactgcacccaratgacctgtggtgtggacgagttccgctgcaaggattcgggccgctgcatcccagcgcgttggaagtgtgacggagaggatgactgtggggatggctcggatgagcccaaggaagagtgtgatgaacgcacctgtgagccataccagttccgctgcaagaacaaccgctgcgtgcccggccgctggcagtgcgactacgacaacgattgcggtgacaactccgatgaagagagctgcacccctcggccctgctcygagagtgagttctcctgtgccaacggccgctgcatcgckgggcgctggaaatgcgatggagaccacgactgcgcggacggctcggacgagaaagactgcaccccccgctgtgacatggaccagttccagtgcaagagcggccactgcatccccctgcgctggcgctgtgacgcagacgccgactgcatggacggcagcgacgaggaggcctgcggcactggcgtgcggacctgccccctggacgagttccagtgcaacaacaccttgtgcaagccgctggcctggaagtgcgatggcgaggatgactgtggggacaactcagatgagaaccccgaggagtgtgcccggttcgtgtgccctcccaaccggcccttccgttgcaagaatgaccgcgtctgtctgtggatcgggcgccaatgcgatggcacggacaactgtggggatgggactgatgaagaggactgtgagccccccacagcccacaccacccactgcaaagacaagaaggagtttctgtgccggaaccagcgctgcctctcctcctccctgcgctgcaacatgttcgatgactgcggggacggctctgacgaggaggactgcagcatcgaccccaagctgaccagctgcgccaccaatgccagcatctgtggggacgaggcacgctgcgtgcgcaccgagaaagcggcctactgtgcctgccgctcgggcttccacaccgtgcccggccagcccggatgccaagacatcaacgagtgcctgcgcttcggcacctgctcccagctctgcaacaacaccaagggcggccacctctgcagctgcgctcggaacttcatgaagacgcacaacacctgcaaggccgaaggctctgagtaccaggtcctgtacatygctgatgacaatgagatccgcagcctgttcccyggccacccccattcggcttacgagcaggcattccagggtgacgagagtgtccgcattgatgctatggatgtccatgtcaaggctggccgtgtctattggaccaactggcacacgggcaccatctcctaccgcagcctgccacctgctgcgcctcctaccacttccaaccgccaccggcgacagattgaccggggtgtcacccacctcaacatttcagggctgaagatgcccagaggcatcgccatcgactgggtggccggaaacgtgtactggaccgactcgggccgagatgtgattgaggtggcgcagatgaagggcgagaaccgcaagacgctcatctcgggcatgattgacgagccccacgccattgtggtggacccactgagggggaccatgtactggtcagactggggcaaccaccccaagattgagacggcagcgatggatgggacgcttcgggagacactggtgcaggacaacattcagtggcccacaggcctggccgtggattatcacaatgagcggctgtactgggcagacgccaagctttcagtcatcggcagcatccggctcaatggcacggaccccattgtggctgctgacagcaaacgaggcctaagtcaccccttcagcatcgacgtctttgaggattacatctatggtgtcacctacatcaataatcgtgtcttcaagatccataagtttggccacagccccttggtcaacctgacagggggcctgagccacgcctctgacgtggtcctttaccatcagcacaagcagcccgaagtgaccaacccatgtgaccgcaagaaatgcgagtggctctgcctgctgagccccagtgggcctgtctgcacctgtcccaatgggaagcggctggacaacggcacatgcgtgcctgtgccctctccaacgccccccccagatgctccccggcctggaacctgtaacctgcagtgcttcaacggtggcagctgtttcctcaatgcacggaggcagcccaagtgccgctgccaaccccgctacacgggtgacaagtgtgaactggaccagtgctgggagcactgtcgcaatgggggcacctgtgctgcctccccctctggcatgcccacgtgccggtgccccacgggcttcacgggccccaaatgcacccagcaggtgtgtgcgggctactgtgccaacaacagcacctgcactgtcaaccagggcaaccagccccagtgccgatgcctacccggcttcctgggcgaccgctgccagtaccggcagtgctctggctactgtgagaactttggcacatgccagatggctgctgatggctcccgacaatgccgctgcactgcctactttgagggatcgaggtgtgaggtgaacaagtgcagccgctgtctcgaaggggcctgtgtggtcaacaagcagagtggggatgtcacctgcaactgcacggatggccgggtggcccccagctgtctgacctgcgtcggccactgcagcaatggcggctcctgtaccatgaacagcaaaatgatgcctgagtgccagtgcccaccccacatgacagggccccggtgtgaggagcacgtcttcagccagcagcagccaggacatatagcctccatcctaatccctctgctgttgctgctgctgctggttctggtggccggagtggtattctggtataagcggcgagtccaaggggctaagggcttccagcaccaacggatgaccaacggggccatgaacgtggagattggaaaccccacctacaagatgtacgaaggcggagagcctgatgatgtgggaggcctactggacgctgactttgccctggaccctgacaagcccaccaacttcaccaaccccgtgtatgccacactctacatggggggccatggcagtcgccactccctggccagcacggacgagaagcgagaactcctgggccggggccctgaggacgagataggggaccccttggcatagggccctgccccgtcggactgcccccagaaagcctcctgccccctgccggtgaagtccttcagtgagcccctccccagccagcccttccctggccccgccggatgtataaatgtaaaaatgaaggaattacattttatatgtgagcgagcaagccggcaagcgagcacagtattatttctccatcccctccctgcctgctccttggcacccccatgctgccttcagggagacaggcagggagggcttggggctgcacctcctaccctcccaccagaacgcaccccactgggagagctggtggtgcagccttcccctccctgtataagacactttgccaaggaggtgggccacacccaggaagggaaagcgggcagccccgttttggggacgtgaacgttttaataatttttgctgaattcctttacaactaaataacacagatattgttataaat

SEQ ID NO: 50 - DNA, 2534 bp, Homo sapiens
gggggttgggaggtagcgtccggtaggtctgcgcagacagcgctgccagacctctgactcccccagtcctgccgccgccgatagccccacaaggcgacatgggaagtccgccggagcagaggggagaaaattcaaaacgagtctactcaacctcgtcttggctccgaggccccgccatggagaccagcataatgcgcaggcgcgccccaccgggagcgcgcagagcagtcccacgacagtaggaccactatcggccaccgtcgaccgtttcctctctcatccgttcttttctttgtatttccgcctctcgcctctctctaaaagccgcagttagaggcgagatttaggaaaaacctctgccgagtgagcctctggttgggaatatgtatgagaaaaaaaaactggcaaggcgttagtcaagcaaagctgaaggcagaggaaatttgatatctggctggagtctagaggatttaatgcaaataagatactctgagggcagcgtggcaaaaaaagactacaattcccggtggtcacagcgtttgagaagcgatgctttctgagacttgtagtaactaggagctgtgtttgaactatccaggctcaggacagcctcttgaaaaaaaattttttattaataaagcggatttgagtgggatctttttcctmatcgattacgggcccacacgtatgggaagaattctaacaatgattaaagggacatgctacctttacgactatccttttctaatcgatgactcctaaatctaggagtaggtagtcgatgtttgtggtctgggcgtctgtagaagggcaacctcgtgctttctgcagaggagaccggagggcagaaggcagagtccaggcttagactgcagttcctcgcttacctgtgcagtctaattttgagctgcctctttgtagtcttaaaaggcaggagcttcgtgtwgtgggtctgctaacccgtacgtttccgtgggcaagtcgtgtgtactcctcgccatggctcagctccaaacacgcttctacactgataacaagaaatatgccgtagatgatgttcccttctcaatccctgctgcctctgaaattgccgaccttagtaacatcatcaataaactactaaaggacaaaaatgagttccacaaacatgtggagtttgatttccttattaagggccagtttctgcgaatgcccttggacaaacacatggaaatggagaacrtctcatcagaagaagttgtggaaatagaatacgtggagaagtatactgcaccccagccagagcaatgcatgttccatgatgactggatcagttcaattaaaggggcagaggaatggatcttgactggttcttatgataagacttctcggatctggtccttggaaggaaagtcaataatgacaattgtgggacatacggatgttgtaaaagatgtggcctgggtgaaaaaagatagtttgtcctgcttattattgagtgcttctatggatcagactattctcttatgggagtggaatgtagagmgaaacaaagtgaaagccctacactgctgtagaggtcatgctggaagtgtagattctatagctgttgatggctcaggaactaaattttgcagtggctcctgggataagatgctaaagatctggtctacagtccctacagatgaagaagatgaaatggaggagtccacaaatcgaccaagaaagaaacagaagacagaacagttgggactaacaaggactcccatagtgaccctctctggccacatggaggcagtttcctcagttctgtggtcagatgctgaagaaatctgcagtgcatcttgggaccatacaattagagtgtgggatgttgagtctggcagtcttaagtcaactttgacaggaaataaagtgtttaattgtatttcctattctccactttgtaaacgtttagcatctggaagcacagataggcatatcagactgtgggatccccgaactaaagatggttctttggtgtcgctgtccctaacgtcacatactggttgggtgacatcagtaaaatggtctcctacccatgaacagcagctgatttcaggatctttagataacattgttaagctgtgggatacaagaagttgtaaggctcctctctatgatctggctgctcatgaagacaaagttctgagtgtagactggacagacacagggctacttctgagtggaggagcagacaataaattgtattcctacagatattcacctaccacttcccatgttggggcatgaaagtgaacaataatttgactatagagattatttctgtaaatgaaattggtagagaaccatgaaattacatagatgcagatgcagaaagcagccttttgaagtttatataatgttttcacccttcataacagctaacgtatcactttttcttattttgtatttataataagataggttgtgtttataaaatacaaactgtggcatacattctctatacaaacttgaaattaaactgagttttacatttctctttaaaggtattg

SEQ ID NO: 51 - DNA, 11920 bp, Homo sapiens
gttggttggagtggcctcactcttacctgccaacctgggaggttgatgatgaacatgtctttaccttttctttggagtttgcttaccttattaatatttgctgaagtaaatggcgaagctggagaacttgagctgcagagacaaaaaagaagcatcaatctccaacagcctcgaatggctacagagagaggaaatttggtgtttcttacggggtctgctcaaaacattgagtttagaaccggatccctgggaaaaattaaattaaatgatgaagatctcagtgagtgtttacatcagatccagaaaaacaaagaagatattatagagttaaaagggagtgcaattggtctgcctcaaaatatatctagtcaaatctatcagcttaattccaagctggtggatcttgagagaaaattccaaggcttgcagcagactgttgacaaaaaggtttgcagcagcaatccttgccagaatggtggaacctgcctcaatctgcatgattcctttttttgtatctgtcccccacagtggaagggtcctctctgctcagctgatgttaacgaatgtgagatttactcaggaacacccttgagctgccagaatggaggcacatgtgttaatacaatgggaagttacagttgtcactgcccacctgagacgtacggaccccagtgtgcatccaaatatgacgactgtgaagggggttctgtggcacgctgtgtccatggcatctgtgaggatttaatgcgagagcaagctggagagcccaagtacagctgcgtctgtgatgctgggtggatgtyttcacccaacagccctgcctgcacgctggacagagacgagtgcagcttccagcccgggccttgctccacacttgtgcagtgtttcaacactcaaggctctttctactgtggggcctgtccaacaggctggcaaggcaatggatatatttgcgaagatatcaatgaatgtgagataaataayggcggctgttctgtggctccacccgttgagtgtgtgaatacacctgggtcttcccactgccaggcctgtccaccagggtaccagggtgacggaagagtgtgcacactcacagacatctgctcagtcagtaatggaggctgccacccagatgcctcatgctcctcaactctaggttccttacctctctgcacgtgtctcccgggttatactggaaatggttatgggmcaaatggatgtgtgcagctcagtaatatttgcctaagtcacccctgtctaaatggacaatgcatcgacactgtctctggytatttttgtaagtgtgactcaggttggacaggtgtcaactgtacagaaaacatcaatgagtgtttgagcaacccctgtttgaatggaggaacttgtgttgatggcgttgattctttcagttgtgaatgcacacgtctctggactggagctctctgtcaggttcctcagcaagtttgtggagagtccctctcaggaataaatggaagcttcagctacaggagcccggatgttggttatgttcatgatgttaactgcttctgggttatcaaaactgaaatgggaaaggtcctgcgtatcactttcacttttttccggttagaatccatggacaactgtccacacgagtttcttcaggtttatgatggagattcctcttctgcttttcaacttggaagattttgtggctccagcctccctcatgaactcctcagcagtgacaatgctctctattttcatctctattctgaacatttaagaaatgggagaggctttacagtaagatgggaaacacagcaaccagagtgtggaggtatcctgactggtccttacggttctattaagtctccggggtatcctggaaactatcccccaggaagagattgtgtctggattgttgtaactagtcctgacctcctggtaacatttacttttgggaccttgagcctcgagcaccatgatgactgcaacaaagattaccttgagattcgagatggtcctttgtatcaggacccccttcttgggaagttctgcaccactttctctgtcccaccgctccagactactggcccctttgccagaattcacttccattcagactcccagattagtgaccaaggcttccatatcacctacttaacatcaccttcggatctgcgttgtggtgggaactacacggacccagagggtgaactcttcttgcctgagttgtctgggcctttcactcacaccaggcaatgcgtctatatgatgaagcagccccagggagaacaaatacaaatcaacttcacccacgtggagctgcaatgccagagtgacagttctcagaattacattgaggttcgagatggtgaaaccttacttggaaaagtctgtggcaacggaaccatctctcacattaaatccattactaatagtgtctggatcaggtttaaaatagatgcttctgttgaaaaagctagtttcagagctgtttatcaagtcgcttgcggggatgaattaactggagaaggggtcattcgctcrcctttttttcctaacgtgtatcctggagaaagaacctgtaggtggaccatccaccagccccaaagccaagtcattctcctcaacttcactgtctttgaaattggaagttctgcccactgtgaaacagattatgttgagattggtagcagttccattttgggttctcctgaaaataaaaagtattgcggtacagacataccttcatttataacatctgtgtacaattttctttatgtcacattcgtgaaaagttcttctactgaaaaccatggtttcatggctaagttcagtgctgaggatttggcatgtggagaaattcttacagaatcaacagggaccattcaaagtcctggccatccaaatgtctacccccacggtatcaactgtacttggcatatattagtccaacctaatcacctgattcatttaatgttcgaaacatttcatctggagtttcattacaattgcacaaacgactacttggaagtttatgacaccgactctgagacatcccttggaagatactgtggaaagtcgatcccgccatctctcacaagcagtggtaactcattgatgctggtgtttgtgactgactccgacctcgcyyatgaaggcttcttaataaactatgaagcaatcagtgcagcaacagcatgtttgcaagactacacagatgatttggggacattcacttctccaaacttccccaataattatcccaacaactgggaatgcatttatcggatcacagtgagaactggccaactgattgcagtgcacttcacaaacttctccttggaggaagccattggaaactattatacagattttctggaaatcagagatggaggctatgaaaaatcaccattgctgggaatattctatggctcaaatctacccccaacaatcatctctcatagtaacaaactrtggttaaaatttaagagtgaccaaatagacacaaggtctggattctcagcttactgggatgggtcatcaacaggttgcgggggtaatctcaccacttcaagcggyacgttcatatctcccaactacccgatgccctattaccacagctctgaatgctactggtggttgaaatctagccacggcagcgcatttgaactggaattcaaagactttcacttggagcatcatccaaactgcactttagattacctggctgtatatgatggcccaagtagcaactctcatctgctaactcagctttgtggggatgagaaaccccctcttattcgttctagtggagacagcatgtttataaaactgaggacagatgaaggtcagcaaggacgtggcttcaaggctgaataccggcagacatgtgagaatgtggtaatagtcaatcaaacctatggcatcttagagagtatagggtatcygaatccttattctgaaaatcagcattgcaactggaccatccgggcaacaacaggcaacactgtgaactacacatttttagcatttgacttggaacatcacataaactgctccacagattatttagagctctatgatggaccacggcagatgggacgctactgtggagtagacctgccccctccagggagtactacaagctccaagcttcaagtgctgctccttacagatggggttggccgccgtgagaaaggatttcagatgcagtggtttgtttacggttgtggtggagagctgtctggggccacaggctccttcagcagccccgggttccccaacaggtatccaccaaacaaggagtgtatctggtacattaggacggaccccgggagtagcattcagctcaccatccatgacttcgatgtggagtatcattcaaggtgcaactttgatgtcttggagatctatggaggccccgatttccactctcccagaatagcccaactgtgtacccagagatcacctgagaaccccatgcaggtctccagcactggaaatgagctagcaattcgattcaagaccgacttgtccataaatgggagaggcttcaatgcgtcatggcaagcagtcactggaggttgtggtgggattttccaggctcccagtggagagatwcattctccaaattaccccagtccttataggagcaacacagactgttcttgggtcattcgggttgacagaaatcatcgtgttctcttgaacttcactgactttgatcttgaaycacaagactcttgtattatggcatacgatggcttaagctccacaatgtcccgccttgccaggacgtgtggaagggagcagctggctaaccccatcgtctcctcaggaaacagcctcttcttgagatttcagtctggcccttccagacagaacagaggcttccgagctcaattcaggcaagcctgcggaggccacatcctcaccagctcatttgatactgtttcctctccacggttccctgccaattatccaaacaatcagaactgcagctggatcattcaagcgcaacctccattaaatcatatcaccctctcttttacccactttgaacttgaaagaagcacaacgtgtgcacgtgactttgtagaaattttggatggcggccacgaagacgcgcccctccgaggccgttactgtggcaccgacatgccccatcctatcacatccttcagcagcgccytgacgctgagattcgtctctgattctagcatcagtgctgggggtttccacaccacggtcaccgcatcagtgtcggcttgtggtggaacgttctacatggctgaaggcatcttcaacagccctggctacccagacatttatccccctaatgtggaatgtgtctggaacatcgtcagttcccctggcaacyggctccagctgtcttttatatctttccagttggaagactctcaggactgcagcagagattttgtggagatccgtgaaggaaatgccacgggtcacttggtgggacgatactgtggaaactccttccctctcaattattcttccatcgttggacataccctgtgggtcagatttatctcagatggttctggcagcrgcacgggcttccaggccacatttatgaagatatttggcaatgataatattgtgggaactcatgggaaagtcgcctctcctttctggcctgaaaactacccacataactccaattaccaatggacagtaaatgtgaaygcatctcacgttgtccatggtagaatcttggagatggacatagaagaaatacaaaactgctattatgacaaattaaggatctatgatgggcctagcattcacgcccgcctaattggagcttactgtggtacccagactgaatctttcagctccactggaaattctttgacatttcatttttactccgactcttcaatctcrgggaagggattccttctggagtggtttgcagtggatgcacctgatggtgttttamctaccattgctccaggtgcttgtggtggcttcctgaggacgggagatgcacccgtgtttctcttctccccgggctggcctgacagttacagtaatagagtggactgtacgtggctcatccaggctcccgactctaccgtggaactcaacattctttccctggacattgaatctcaccgaacgtgtgcctatgatagccttgtgatacgagatggagataataacttggcccagcagctagcagttctctgtggcagagagatccctgggcccatccggtctactggagagtacatgttcatccgcttcacctcggactccagtgtaaccagggcaggcttcaatgcatcctttcacaagagctgcggtggatatttgcatgcagacagagggatcatcacgtcccccaagtatccagagacttacccatccaacctcaactgttcttggcacgtcctggtccaaagtggcctgaccattgctgtccattttgaacagcctttccagattccaaatggagattcttcttgcaaccagggggattacttggtgctaagaaatggtcctgatatctrttctccacccttgggaccccctggaggaaatggtcatttttgtggcagtcatgcttcatcaactctgttcacctcggataatcaaatgtttgttcagtttatttctgatcacagtaatgaagggcaaggatttaaaatcaaatatgaggcaaagagtttagcctgtgggggcaacgtctacatccatgatgctgattctgctgggtatgtgacctcccccaaccaccctcataattatcccccgcacgctgattgcatttggatcttagcggctccaccggaaacacgcatacagctgcaatktgaagatcgattcgatattgaagtaacacccaactgtacttccaactaccttgagttgcgggatggagtggattcggatgcaccaatactttccaaattttgtgggacatctttgcccagcagtcagtggtcctcaggagaggttatgtatttgagatttcgatctgacaacagccccacacatgtgggattcaaggccaagtattctatagctcagtgtgggggaagagtaccagggcaaagtggtgttgttgaaagcattggacatccaacacttccatacagagacaacttattctgtgagtggcatctccaggggctctctggacactatctcaccatctcttttgaagactttaaccttcagaattcttctggctgtgaaaaagacttcgtggagatctgggacaatcatacctctggaaacatcttgggcagatactgtggaaacaccattcctgacagcatagacacttctagcaatactgctgtggtcaggtttgtcacagacggctctgtgactgcctcaggattcagactgcgatttgaatccagtatggaagagtgtggtggggatcttcagggctctattggaacatttacttctcccaactacccgaacccaaatcctcatggccggatctgcgagtggagaatcactgccccggagggaaggcggatcaccctaatgtttaacaacctgaggctggccacgcatccgtcctgcaacaatgagcatgtgatagtattcaatggcattagaagtaactcaccccagctagagaaactgtgtagtagtgtgaatgtaagcaatgagattaaatcttcaggaaacacaatgaaagtcatttttttcacggatggatccaggccatatggcggcttcactgcttcctatacctccagtgaagatgcagtgtgtggtgggtctcttcsaaatactcctgaaggaaactttacttctcctggctatgacggagtcaggaattactcaagaaacctgaactgcgaatggactctcagcaatccaaatcagggaaattcatccatttccattcactttgaagatttttacctagaaagtcaccaagactgtcaatttgatgtcctcgagtttcgagtgggtgatgctgatgggcccctgatgtggagactttgtggtccttcaaagcctacattgccattggttataccttattctcaggtatggattcactttgtcaccaacgaacgtgtagaacacattggattccatgcaaagtattcctttacagattgtggcggaatacagataggtgacagtggagtgatcacaagccccaactatccaaatgcttatgacagcctgacccactgctcttsgctgttggaggccccacaagggcacaccatcactctcacatttagtgactttgatattgaaccccatacaacttgtgcttgggactctgtcactgtcaggaatggtgggtcccctgaatcacccatcataggacaatactgtggaaattcaaaccccaggacaatacagtcaggttccaatcagctggtcgtgacttttaactcagaccattcattgcaaggtggtggattttatgctacgtggaacacacaaactttaggttgtggtggaatatttcattctgataatggtacaatcagatcccctcactggcctcagaattttcccgaaaacagcagatgttcctggacggccattactcacaaaagtaaacacttggagatcagctttgacaacaacttcctaatccccagcggtgatggacaatgtcagaatagcttcgtgaaggtgtgggcaggaactgaggaggtggacaaagccctgmtagccactggctgtgggaacgtggctccgggtcccgttatcacaccaagtaacacattcactgccgtcttccagtctcaggaggcaccagctcagggcttctccgcgtcctttgttagccgatgtggaagtaatttcactggcccttcaggttacatcatttctccaaattacccaaaacaatatgacaacaacatgaattgcacctatgtcatagaggctaatcctctgtcagtggtcctcttgacttttgtgtccttccacttagaagctcgttccgctgtgacgggaagctgtgtcaacgatggcgtgcacrttatcagaggttacagcgtcatgtccaccccatttgctactgtgtgtggggatgrgatgccagctcccctcaccatcgcygggccggttctgcttaacttctactccaacgagcaaatcacagacttcggattcaagttttcctataggataatctcctgtggtggtgtgttcaatttctcttctggaatcatcacaagtcctgcctattcatacgcagactacccaaatgatatgcactgtctgtataccatcaccgttagtgacgacaaggtgatcgagctcaagttcagtgattttgatgtggttccctccacctcctgctcccatgactacctggcaatttacgatggtgccaataccagcgatccccttcttggcaaattctgcggttccaagcgcccaccaaatgtgaagagcagcaataatagtatgctcctggtgttcaagacagattcatttcagacagcaaaaggctggaagatgtctttccggcagacattggggcctcagcaaggatgtggtggttatctgacaggctcgaataatacctttgcctctcctgattctgattcgaatggaatgtatgacaagaatttaaactgtgtatggatcataattgcacctgtaaacaaagtaattcacctcaccttcaatacatttgctctggaggcagcaagtactaggcaaagatgcctttatgattatgtaaagttatatgatggggatagtgaaaatgcgaacttggctggaacgttttgtggttccacagtacctgctccttttatctcttctggtaacttccttacggttcaattcatcagtgacttaacattagagagggaaggatttaatgctacatacaccatcatggacatgccttgtggtggaacrtacaatgcaacttggaccccacaaaatatttcatcacccaattcatcagacccagatgtcccattttccatctgtacttgggtcattgattcccctccgcatcagcaggtcaagataactgtgtgggcattacagctgacctcgcaagactgcacgcagaattacttacagcttcaggactcaccgcagggtcacggaaattcaagatttcagttctgtggcagaaatgcttcggctgtgccagtgttttattcttctatgagtactgcaatggtcattttcaaatctggagttgtaaacagaaactctagaatgagtttcacctatcagattgcagattgcaacagagactatcacaaggcatttggcaacctgagaagccctggatggccagataactacgacaatgacaaggattgcaycgttactctcacagccccccagaaccacaccatttccctcttttttcattcacttggcatcgagaactcagttgaatgcagaaacgatttcttggaggtgagaaatggaagtaacagcaattcaccattactgggcaagtactgtggaactctgctgccaaaccctgtcttctctcaaaataatgaactatacctacgatttaagagtgatagtgtaacttctgatcgtggatatgaaatcatctggacttcatcaccctctggatgtggtggaactctttatggagacagaggctcattcaccagccccggctatccaggcacatacccaaacaacacgtactgcgagtgggtccttgttgctcctgctggaaggcttgtcaccatcaasttctacttcatcagcattgacgatccaggagactgtgtccagaactatctcacactctatgatgggcccaacgccagctctccatcctctggaccatactgcggaggcgacaccagcatagctcccttcgtggcttcctcaaatcaggtcttcataaaatttcatgctgattatgcacggcgtccatccgcattccgattaacttgggacagctaagtgggtaacaactcgtgttcactcagcactttccctctgcagcacgctggacagcactctgccatcctgatacatgacccctgctgatgccacagagaataagctgaacttgtatggtttttcaccaaaccatrgatagaatcaatatttgtaggccaggcgtggtggctcacccccctgtattctcagcactttgggaggccgaggcaggttgatcacctgaggtcaggagtttgagactagcctggccagcatggtgaaacctcatctctctaacaatataataattagccaggcgtggtggtgggtgcctgtaattccagccactcgagaggctgaggcaggagaattgcttgaacccaggaggcagaggttgcagtgagctaagatcacaccactacactccagcctgggcgagacggcaagactccatctcaaaaaaaaaagaaacaaaaaaaaccagaatcaatatttgtacattttctcgaacatagaatatagcttctttagtcttgagtgtgcatttcattctaatattttgagctgaaatttaaaaaaactttgaaagagttggaaatgattatggcatatgtgacatacrtttttaaaagttaataataatagccaggggcagtggctcatacccataatcccagcacgctgggaggccatgatgggaggattgcttgaacctaggagtttgagaccagcctgggcaacaaagtgagacctgatttttacaaaaaatcaaaaaattagccaggcatggtggcatgcacccgtggttccagctacacaggaggttgaagcaggaggatcacttgagcccagtaggttaaggctgcagtgaaaccctgtgaattaaccactgtactccagcctgggtgacagactgagaccctatctcaaaaatgacaacaagaacaacaaaagttaatgataatatagaagcataaatttcctgtgaatgttcaattacacataataaacattattgaattgt

SEQ ID NO: 52 - DNA, 5053 bp, Homo sapiens
gagaagaaagccagtgcgtctctgggcgcaggggccagtggggctcggaggcacaggcaccccgcgacactccaggttccccgacccacgtccctggcagccccgattatttacagcctcagcagagcacggggcgggggcagaggggcccgcccgggagggctgctacttcttaaaacctctgckggctgcttagtcacagccccccttgcttgggtgtgtccttcgctcgctccctccctccgtcttaggtcactgttttcaacctcgaataaaaactgcagccaacttccgaggcagcctcattgcccagcggaccccagcctctgccaggttcggtccgccatcctcgtcccgtcctccgccggcccctgccccgcgcccagggatcctccagctcctttcgcccgcgccctccgttcgctccggacaccatggacaagttttggtggcacgcagcctggggactctgcctcgtgccgctgagcctggcgcagatcgatttgaatataacctgccgctttgcaggtgtattccacgtggagaaaaatggtcgctacagcatctctcggacggaggccgctgacctctgcaaggctttcaatagcaccttgcccacaatggcccagatggagaaagctctgagcatcggatttgagacctgcaggtatgggttcatagaagggcaygtggtgattccccggatccaccccaactccatctgtgcagcaaacaacacaggggtgtacatcctcacatmcaacacctcccagtatgacacatattgcttcaatgcttcagctccacctgaagaagattgtacatcagtcacagacctgcccaatgcctttgatggaccaattaccataactattgttaaccgtgatggcacccgctatgtccagaaaggagaatacagaacgaatcctgaagacatctaccccagcaaccctactgatgatgacgtgagcagcggctcctccagtgaaaggagcagcacttcaggaggttacatcttttacaccttttctactgtacaccccatcccagacgaagacagtccctggatcaccgacagcacagacagaatccctgctaccagtacgtcttcaaataccatctcagcaggctgggagccaaatgaagaaaatgaagatgaaagagacagacacctcagtttttctggatcaggcattgatgatgatgaagattttatctccagcaccaatatggactccagtcatagtayaacgcttcagcctactgcaaatccaaacacaggtttggtggaagatttggacaggacaggacctctttcaatgacaacgcagcagagtaattctcagagcttctctacatcacatgaaggcttggaagaagataaagaccatccaacaacttctactctgacatcaagcaataggaatgatgtcacaggtggaagaagagacccaaatcattctgaaggctcaactactttactggaaggttatacctctcattacccacacacgaaggaaagcaggaccttcatcccagtgacctcagctaagactgggtcctttggagttactgcagttactgttggagattccaactctaatgtcaatcgttccttatcaggagaccaagacacattccaccccagtggggggtcccataccactcatggatctgaatcagatggacactcacatgggagtcaagaaggtggagcaaacacaacctctggtcctataaggacaccccaaattccagaatggctgatcatcttggcatccctcttggccttggctttgattcttgcagtttgcattgcagtcaacagtcgaagaaggtgtgggcagaagaaaaagctagtgatcaacagtggcaatggagctgtggaggacagaaagccaagtggactcaacggagaggccagcaagtctcaggaaatggtgcatttggtgaacaaggagtcgtcagaaactccagaccagtttatgacagctgatgagacaaggaacctgcagaatgtggacatgaagattggggtgtaacacctacaccattatcttggaaagaaacaaccgttggaaacataaccattacagggagctgggacacttaacagatgcaatgtgctactgattgtttcattgcgaatcttttttagcataaaattttctactyttttygttttttgtgttttgttctttaaagtcaggtccaatttgtaaaaacagcattgctttctgaaattagggcccaattaataatcagcaagaatttgatcgttccagttcccacttggaggcctttcatccctcgggtgtgctatggatggcttctaacaaaaactacacatatgtattcctgatcgccaacctttcccccaccagctaaggacatttcccagggttaatagggcctggtccctgggaggaaatttgaatgggtccattttgcccttccatagcctaatccctgggcattgytttccactgaggttgggggttggggtgtactagttacayatcttcaacagaccccctctagaaatttttcagatgcttctgggagacacccaaagggtgaagctatttatctgtagtaaactatttatctgtgtttttgaaatattaaaccctggatcagtcctttgatcagtataattttttaaagttactttgtcagaggcacaaaagggtttaaactgattcataataaatatctgtacttcttcgatcttcaccttttgtgctgtgattcttcagtttctaaaccagcactgtctgggtccctacaatgtatcaggaagagctgagaatggtaaggagactcttctaagtcttcatctcagagaccctgagttcccactcagacccactcagccaaatctcatggaagaccaaggagggcagcactgtttttgttttttgttttttacactgtccaaaggttttccatcctgtcctggaatcagagttggaagctgaggagcttcagcctcttttatggtttaatggccacctgttctctcctgtgaaaggctttgcaaagtcacattaagtttgcatgacctgttatccctggggccctatttcatagaggctggccctattagtgatttccaaaaacaatatggaagtgccttttgatgtcttacaataagagaagaagccaatggaaatgaaagagattggcaaaggggaaggatgatgccatgtagatcctgtttgacatttttatggctgtatttgtaaacttaaacacaccagtgtctgttcttgatgcagttgctatttaggatgagttaagtgcctggggagtccctcaaaaggttaaagggattcccatcattggaatcttatcaccagataggcaagtttatgaccaaacaagagagtactggctttatcctctaacctcatattttctcccacttggcaagtcctttgtggcatttattcatcagtcagggtgtccgattggtcctagaacttccaaaggctgcttgtcatagaagccattgcatctataaagcaacggctcctgttaaatggtatctcctttctgaggctcctactaaaagtcatttgttacctaaacttatgtgcttaacaggcaatgcttctcagaccacaaagcagaaagaagaagaaaagctcctgactaaatcagggctgggcttagacagagttgatctrtagaatatctttaaaggagagatgtcaactttctgcactattcccagcctctgctcctccctgtctaccctctcccctccctctctccctccacttcaccccacaatctttggtctggatttctttttattttcttttcaacttgaaagaaactggacattaggccactatgtgttgttactgccactagtgttcaagtgcctcttgttttcccagagatttcctgggtctgccagaggcccagacaggctcactcaagctctttaactgaaaagcaacaagccactccaggacaaggttcaaaatggttacaacagcctctacctgtcgccccagggagaaaggggtagtgatacaagtctcatagccagagatggttttccactccttctagatattcccaaaaagaggctgagacaggaggttattttcaattttattttggaattaaatacttttttccctttattactgttgtagtccctcacttggatatacctctgttttcacgatagaaataagggaggtctagagcttctattccttggccattgtcaacggagagctggccaagtcttcacaaacccttgcaacattgcctgaagtttatggaataagatgtattctcactcccttgatctcaagggcgtaactctggaagcacagcttgactacaygtcatttttaccaatgattttcaggtgacctgggctaagtcatttaaactgggtctttataaaagtaaaaggccaacatttaattattttgcaaagcaacctaagagctaaagatgtaatttttcttgcaattgtaaatcttttgtgtctcctgaagacttcccttaaaattagctctgagtgaaaaatcaaaagagacaaaagacatcttcgaatccatatttcaagcctggtagaattggcttttctagcagaacctttccaaaagttttatattgagattcataacaacaccaagaattgattttgtagccaacattcattcaatactgttatatcagaggagtaggagagaggaaacatttgacttatctggaaaagcaaaatgtacttaagaataagaataacatggtccattcacctttatgttatagatatgtctttgtgtaaatcatttgttttgagttttcaaagaatagcccattgttcattcttgtgctgtacaatgaccactgttattgttactttgacttttcagagcacacccttcctctggtttttgtatatttattgatggatcaataataatgaggaaagcatgatatgtatattgctgagttgaaagcacttattggaaaatattaaaaggctaacattaaaagactaaaggaaacagactcagaa

SEQ ID NO: 53 - DNA, 4723 bp, Homo sapiens
gagaagaaagccagtgcgtctctgggcgcaggggccagtggggctcggaggcacaggcaccccgcgacactccaggttccccgacccacgtccctggcagccccgattatttacagcctcagcagagcacggggcgggggcagaggggcccgcccgggagggctgctacttcttaaaacctctgckggctgcttagtcacagccccccttgcttgggtgtgtccttcgctcgctccctccctccgtcttaggtcactgttttcaacctcgaataaaaactgcagccaacttccgaggcagcctcattgcccagcggaccccagcctctgccaggttcggtccgccatcctcgtcccgtcctccgccggcccctgccccgcgcccagggatcctccagctcctttcgcccgcgccctccgttcgctccggacaccatggacaagttttggtggcacgcagcctggggactctgcctcgtgccgctgagcctggcgcagatcgatttgaatataacctgccgctttgcaggtgtattccacgtggagaaaaatggtcgctacagcatctctcggacggaggccgctgacctctgcaaggctttcaatagcaccttgcccacaatggcccagatggagaaagctctgagcatcggatttgagacctgcaggtatgggttcatagaagggcaygtggtgattccccggatccaccccaactccatctgtgcagcaaacaacacaggggtgtacatcctcacatmcaacacctcccagtatgacacatattgcttcaatgcttcagctccacctgaagaagattgtacatcagtcacagacctgcccaatgcctttgatggaccaattaccataactattgttaaccgtgatggcacccgctatgtccagaaaggagaatacagaacgaatcctgaagacatctaccccagcaaccctactgatgatgacgtgagcagcggctcctccagtgaaaggagcagcacttcaggaggttacatcttttacaccttttctactgtacaccccatcccagacgaagacagtccctggatcaccgacagcacagacagaatccctgctaccaatatggactccagtcatagtayaacgcttcagcctactgcaaatccaaacacaggtttggtggaagatttggacaggacaggacctctttcaatgacaacgcagcagagtaattctcagagcttctctacatcacatgaaggcttggaagaagataaagaccatccaacaacttctactctgacatcaagcagagaccaagacacattccaccccagtggggggtcccataccactcatggatctgaatcagatggacactcacatgggagtcaagaaggtggagcaaacacaacctctggtcctataaggacaccccaaattccagaatggctgatcatcttggcatccctcttggccttggctttgattcttgcagtttgcattgcagtcaacagtcgaagaaggtgtgggcagaagaaaaagctagtgatcaacagtggcaatggagctgtggaggacagaaagccaagtggactcaacggagaggccagcaagtctcaggaaatggtgcatttggtgaacaaggagtcgtcagaaactccagaccagtttatgacagctgatgagacaaggaacctgcagaatgtggacatgaagattggggtgtaacacctacaccattatcttggaaagaaacaaccgttggaaacataaccattacagggagctgggacacttaacagatgcaatgtgctactgattgtttcattgcgaatcttttttagcataaaattttctactyttttygttttttgtgttttgttctttaaagtcaggtccaatttgtaaaaacagcattgctttctgaaattagggcccaattaataatcagcaagaatttgatcgttccagttcccacttggaggcctttcatccctcgggtgtgctatggatggcttctaacaaaaactacacatatgtattcctgatcgccaacctttcccccaccagctaaggacatttcccagggttaatagggcctggtccctgggaggaaatttgaatgggtccattttgcccttccatagcctaatccctgggcattgytttccactgaggttgggggttggggtgtactagttacayatcttcaacagaccccctctagaaatttttcagatgcttctgggagacacccaaagggtgaagctatttatctgtagtaaactatttatctgtgtttttgaaatattaaaccctggatcagtcctttgatcagtataattttttaaagttactttgtcagaggcacaaaagggtttaaactgattcataataaatatctgtacttcttcgatcttcaccttttgtgctgtgattcttcagtttctaaaccagcactgtctgggtccctacaatgtatcaggaagagctgagaatggtaaggagactcttctaagtcttcatctcagagaccctgagttcccactcagacccactcagccaaatctcatggaagaccaaggagggcagcactgtttttgttttttgttttttacactgtccaaaggttttccatcctgtcctggaatcagagttggaagctgaggagcttcagcctcttttatggtttaatggccacctgttctctcctgtgaaaggctttgcaaagtcacattaagtttgcatgacctgttatccctggggccctatttcatagaggctggccctattagtgatttccaaaaacaatatggaagtgccttttgatgtcttacaataagagaagaagccaatggaaatgaaagagattggcaaaggggaaggatgatgccatgtagatcctgtttgacatttttatggctgtatttgtaaacttaaacacaccagtgtctgttcttgatgcagttgctatttaggatgagttaagtgcctggggagtccctcaaaaggttaaagggattcccatcattggaatcttatcaccagataggcaagtttatgaccaaacaagagagtactggctttatcctctaacctcatattttctcccacttggcaagtcctttgtggcatttattcatcagtcagggtgtccgattggtcctagaacttccaaaggctgcttgtcatagaagccattgcatctataaagcaacggctcctgttaaatggtatctcctttctgaggctcctactaaaagtcatttgttacctaaacttatgtgcttaacaggcaatgcttctcagaccacaaagcagaaagaagaagaaaagctcctgactaaatcagggctgggcttagacagagttgatctrtagaatatctttaaaggagagatgtcaactttctgcactattcccagcctctgctcctccctgtctaccctctcccctccctctctccctccacttcaccccacaatctttggtctggatttctttttattttcttttcaacttgaaagaaactggacattaggccactatgtgttgttactgccactagtgttcaagtgcctcttgttttcccagagatttcctgggtctgccagaggcccagacaggctcactcaagctctttaactgaaaagcaacaagccactccaggacaaggttcaaaatggttacaacagcctctacctgtcgccccagggagaaaggggtagtgatacaagtctcatagccagagatggttttccactccttctagatattcccaaaaagaggctgagacaggaggttattttcaattttattttggaattaaatacttttttccctttattactgttgtagtccctcacttggatatacctctgttttcacgatagaaataagggaggtctagagcttctattccttggccattgtcaacggagagctggccaagtcttcacaaacccttgcaacattgcctgaagtttatggaataagatgtattctcactcccttgatctcaagggcgtaactctggaagcacagcttgactacaygtcatttttaccaatgattttcaggtgacctgggctaagtcatttaaactgggtctttataaaagtaaaaggccaacatttaattattttgcaaagcaacctaagagctaaagatgtaatttttcttgcaattgtaaatcttttgtgtctcctgaagacttcccttaaaattagctctgagtgaaaaatcaaaagagacaaaagacatcttcgaatccatatttcaagcctggtagaattggcttttctagcagaacctttccaaaagttttatattgagattcataacaacaccaagaattgattttgtagccaacattcattcaatactgttatatcagaggagtaggagagaggaaacatttgacttatctggaaaagcaaaatgtacttaagaataagaataacatggtccattcacctttatgttatagatatgtctttgtgtaaatcatttgttttgagttttcaaagaatagcccattgttcattcttgtgctgtacaatgaccactgttattgttactttgacttttcagagcacacccttcctctggtttttgtatatttattgatggatcaataataatgaggaaagcatgatatgtatattgctgagttgaaagcacttattggaaaatattaaaaggctaacattaaaagactaaaggaaacagactcagaa

SEQ ID NO: 54 - DNA, 5674 bp, Homo sapiens
gagaagaaagccagtgcgtctctgggcgcaggggccagtggggctcggaggcacaggcaccccgcgacactccaggttccccgacccacgtccctggcagccccgattatttacagcctcagcagagcacggggcgggggcagaggggcccgcccgggagggctgctacttcttaaaacctctgckggctgcttagtcacagccccccttgcttgggtgtgtccttcgctcgctccctccctccgtcttaggtcactgttttcaacctcgaataaaaactgcagccaacttccgaggcagcctcattgcccagcggaccccagcctctgccaggttcggtccgccatcctcgtcccgtcctccgccggcccctgccccgcgcccagggatcctccagctcctttcgcccgcgccctccgttcgctccggacaccatggacaagttttggtggcacgcagcctggggactctgcctcgtgccgctgagcctggcgcagatcgatttgaatataacctgccgctttgcaggtgtattccacgtggagaaaaatggtcgctacagcatctctcggacggaggccgctgacctctgcaaggctttcaatagcaccttgcccacaatggcccagatggagaaagctctgagcatcggatttgagacctgcaggtatgggttcatagaagggcaygtggtgattccccggatccaccccaactccatctgtgcagcaaacaacacaggggtgtacatcctcacatmcaacacctcccagtatgacacatattgcttcaatgcttcagctccacctgaagaagattgtacatcagtcacagacctgcccaatgcctttgatggaccaattaccataactattgttaaccgtgatggcacccgctatgtccagaaaggagaatacagaacgaatcctgaagacatctaccccagcaaccctactgatgatgacgtgagcagcggctcctccagtgaaaggagcagcacttcaggaggttacatcttttacaccttttctactgtacaccccatcccagacgaagacagtccctggatcaccgacagcacagacagaatccctgctaccactttgatgagcactagtgctacagcaactgagacagcaaccaagaggcaagaaacctgggattggttytcatggttgtttctaccatcagagtcaaagaatcatcttcacacaacaacacaaatggctggtacgtcttcaaataccatctcagcaggctgggagccaaatgaagaaaatgaagatgaaagagacagacacctcagtttttctggatcaggcattgatgatgatgaagattttatctccagcaccatttcaaccacaccacgggcttttgaccacacaaaacagaaccaggactggacycagtggaacccaagccattcaaatccggaagtgctacttcagacaaccacaaggatgactgatgtagacagaaatggcaccactgcttatgaaggaaactggaacccagaagcacaccctcccctcattcaccatgagcatcatgargaagaagagaccccacattctacaagcacaatccaggcaactcctagtagtacaayggaagaaacagctacccagaaggaacagtggtttggcaacagatggcatgagggatatcgccaaacmcccaragaagactcccattcgacaacagggacagctgcagcctcagctcatamcagccatccaatgcaaggaaggacaacaccaagcccagaggacagttcctggactgatttcttcaacccaatctcacaccccatgggacgaggtcatcaagcaggaagaaggatggatatggactccagtcatagtayaacgcttcagcctactgcaaatccaaacacaggtttggtggaagatttggacaggacaggacctctttcaatgacaacgcagcagagtaattctcagagcttctctacatcacatgaaggcttggaagaagataaagaccatccaacaacttctactctgacatcaagcaataggaatgatgtcacaggtggaagaagagacccaaatcattctgaaggctcaactactttactggaaggttatacctctcattacccacacacgaaggaaagcaggaccttcatcccagtgacctcagctaagactgggtcctttggagttactgcagttactgttggagattccaactctaatgtcaatcgttccttatcaggagaccaagacacattccaccccagtggggggtcccataccactcatggatctgaatcagatggacactcacatgggagtcaagaaggtggagcaaacacaacctctggtcctataaggacaccccaaattccagaatggctgatcatcttggcatccctcttggccttggctttgattcttgcagtttgcattgcagtcaacagtcgaagaaggtgtgggcagaagaaaaagctagtgatcaacagtggcaatggagctgtggaggacagaaagccaagtggactcaacggagaggccagcaagtctcaggaaatggtgcatttggtgaacaaggagtcgtcagaaactccagaccagtttatgacagctgatgagacaaggaacctgcagaatgtggacatgaagattggggtgtaacacctacaccattatcttggaaagaaacaaccgttggaaacataaccattacagggagctgggacacttaacagatgcaatgtgctactgattgtttcattgcgaatcttttttagcataaaattttctactyttttygttttttgtgttttgttctttaaagtcaggtccaatttgtaaaaacagcattgctttctgaaattagggcccaattaataatcagcaagaatttgatcgttccagttcccacttggaggcctttcatccctcgggtgtgctatggatggcttctaacaaaaactacacatatgtattcctgatcgccaacctttcccccaccagctaaggacatttcccagggttaatagggcctggtccctgggaggaaatttgaatgggtccattttgcccttccatagcctaatccctgggcattgytttccactgaggttgggggttggggtgtactagttacayatcttcaacagaccccctctagaaatttttcagatgcttctgggagacacccaaagggtgaagctatttatctgtagtaaactatttatctgtgtttttgaaatattaaaccctggatcagtcctttgatcagtataattttttaaagttactttgtcagaggcacaaaagggtttaaactgattcataataaatatctgtacttcttcgatcttcaccttttgtgctgtgattcttcagtttctaaaccagcactgtctgggtccctacaatgtatcaggaagagctgagaatggtaaggagactcttctaagtcttcatctcagagaccctgagttcccactcagacccactcagccaaatctcatggaagaccaaggagggcagcactgtttttgttttttgttttttacactgtccaaaggttttccatcctgtcctggaatcagagttggaagctgaggagcttcagcctcttttatggtttaatggccacctgttctctcctgtgaaaggctttgcaaagtcacattaagtttgcatgacctgttatccctggggccctatttcatagaggctggccctattagtgatttccaaaaacaatatggaagtgccttttgatgtcttacaataagagaagaagccaatggaaatgaaagagattggcaaaggggaaggatgatgccatgtagatcctgtttgacatttttatggctgtatttgtaaacttaaacacaccagtgtctgttcttgatgcagttgctatttaggatgagttaagtgcctggggagtccctcaaaaggttaaagggattcccatcattggaatcttatcaccagataggcaagtttatgaccaaacaagagagtactggctttatcctctaacctcatattttctcccacttggcaagtcctttgtggcatttattcatcagtcagggtgtccgattggtcctagaacttccaaaggctgcttgtcatagaagccattgcatctataaagcaacggctcctgttaaatggtatctcctttctgaggctcctactaaaagtcatttgttacctaaacttatgtgcttaacaggcaatgcttctcagaccacaaagcagaaagaagaagaaaagctcctgactaaatcagggctgggcttagacagagttgatctrtagaatatctttaaaggagagatgtcaactttctgcactattcccagcctctgctcctccctgtctaccctctcccctccctctctccctccacttcaccccacaatctttggtctggatttctttttattttcttttcaacttgaaagaaactggacattaggccactatgtgttgttactgccactagtgttcaagtgcctcttgttttcccagagatttcctgggtctgccagaggcccagacaggctcactcaagctctttaactgaaaagcaacaagccactccaggacaaggttcaaaatggttacaacagcctctacctgtcgccccagggagaaaggggtagtgatacaagtctcatagccagagatggttttccactccttctagatattcccaaaaagaggctgagacaggaggttattttcaattttattttggaattaaatacttttttccctttattactgttgtagtccctcacttggatatacctctgttttcacgatagaaataagggaggtctagagcttctattccttggccattgtcaacggagagctggccaagtcttcacaaacccttgcaacattgcctgaagtttatggaataagatgtattctcactcccttgatctcaagggcgtaactctggaagcacagcttgactacaygtcatttttaccaatgattttcaggtgacctgggctaagtcatttaaactgggtctttataaaagtaaaaggccaacatttaattattttgcaaagcaacctaagagctaaagatgtaatttttcttgcaattgtaaatcttttgtgtctcctgaagacttcccttaaaattagctctgagtgaaaaatcaaaagagacaaaagacatcttcgaatccatatttcaagcctggtagaattggcttttctagcagaacctttccaaaagttttatattgagattcataacaacaccaagaattgattttgtagccaacattcattcaatactgttatatcagaggagtaggagagaggaaacatttgacttatctggaaaagcaaaatgtacttaagaataagaataacatggtccattcacctttatgttatagatatgtctttgtgtaaatcatttgttttgagttttcaaagaatagcccattgttcattcttgtgctgtacaatgaccactgttattgttactttgacttttcagagcacacccttcctctggtttttgtatatttattgatggatcaataataatgaggaaagcatgatatgtatattgctgagttgaaagcacttattggaaaatattaaaaggctaacattaaaagactaaaggaaacagactcagaa

SEQ ID NO: 55 - DNA, 5739 bp, Homo sapiens
gagaagaaagccagtgcgtctctgggcgcaggggccagtggggctcggaggcacaggcaccccgcgacactccaggttccccgacccacgtccctggcagccccgattatttacagcctcagcagagcacggggcgggggcagaggggcccgcccgggagggctgctacttcttaaaacctctgckggctgcttagtcacagccccccttgcttgggtgtgtccttcgctcgctccctccctccgtcttaggtcactgttttcaacctcgaataaaaactgcagccaacttccgaggcagcctcattgcccagcggaccccagcctctgccaggttcggtccgccatcctcgtcccgtcctccgccggcccctgccccgcgcccagggatcctccagctcctttcgcccgcgccctccgttcgctccggacaccatggacaagttttggtggcacgcagcctggggactctgcctcgtgccgctgagcctggcgcagatcgatttgaatataacctgccgctttgcaggtgtattccacgtggagaaaaatggtcgctacagcatctctcggacggaggccgctgacctctgcaaggctttcaatagcaccttgcccacaatggcccagatggagaaagctctgagcatcggatttgagacctgcaggtatgggttcatagaagggcaygtggtgattccccggatccaccccaactccatctgtgcagcaaacaacacaggggtgtacatcctcacatmcaacacctcccagtatgacacatattgcttcaatgcttcagctccacctgaagaagattgtacatcagtcacagacctgcccaatgcctttgatggaccaattaccataactattgttaaccgtgatggcacccgctatgtccagaaaggagaatacagaacgaatcctgaagacatctaccccagcaaccctactgatgatgacgtgagcagcggctcctccagtgaaaggagcagcacttcaggaggttacatcttttacaccttttctactgtacaccccatcccagacgaagacagtccctggatcaccgacagcacagacagaatccctgctaccactttgatgagcactagtgctacagcaactgagacagcaaccaagaggcaagaaacctgggattggttytcatggttgtttctaccatcagagtcaaagaatcatcttcacacaacaacacaaatggctggtacgtcttcaaataccatctcagcaggctgggagccaaatgaagaaaatgaagatgaaagagacagacacctcagtttttctggatcaggcattgatgatgatgaagattttatctccagcaccatttcaaccacaccacgggcttttgaccacacaaaacagaaccaggactggacycagtggaacccaagccattcaaatccggaagtgctacttcagacaaccacaaggatgactgatgtagacagaaatggcaccactgcttatgaaggaaactggaacccagaagcacaccctcccctcattcaccatgagcatcatgargaagaagagaccccacattctacaagcacaatccaggcaactcctagtagtacaayggaagaaacagctacccagaaggaacagtggtttggcaacagatggcatgagggatatcgccaaacmcccaragaagactcccattcgacaacagggacagctgcagcctcagctcatamcagccatccaatgcaaggaaggacaacaccaagcccagaggacagttcctggactgatttcttcaacccaatctcacaccccatgggacgaggtcatcaagcaggaagaaggatggatatggactccagtcatagtayaacgcttcagcctactgcaaatccaaacacaggtttggtggaagatttggacaggacaggacctctttcaatgacaacgcagcagagtaattctcagagcttctctacatcacatgaaggcttggaagaagataaagaccatccaacaacttctactctgacatcaagcaataggaatgatgtcacaggtggaagaagagacccaaatcattctgaaggctcaactactttactggaaggttatacctctcattacccacacacgaaggaaagcaggaccttcatcccagtgacctcagctaagactgggtcctttggagttactgcagttactgttggagattccaactctaatgtcaatcgttccttatcaggagaccaagacacattccaccccagtggggggtcccataccactcatggatctgaatcagatggacactcacatgggagtcaagaaggtggagcaaacacaacctctggtcctataaggacaccccaaattccagaatggctgatcatcttggcatccctcttggccttggctttgattcttgcagtttgcattgcagtcaacagtcgaagaaggtgtgggcagaagaaaaagctagtgatcaacagtggcaatggagctgtggaggacagaaagccaagtggactcaacggagaggccagcaagtctcaggaaatggtgcatttggtgaacaaggagtcgtcagaaactccagaccagtttatgacagctgatgagacaaggaacctgcagaatgtggacatgaagattggggtgtaacacctacaccattatcttggaaagaaacaaccgttggaaacataaccattacagggagctgggacacttaacagatgcaatgtgctactgattgtttcattgcgaatcttttttagcataaaattttctactyttttygttttttgtgttttgttctttaaagtcaggtccaatttgtaaaaacagcattgctttctgaaattagggcccaattaataatcagcaagaatttgatcgttccagttcccacttggaggcctttcatccctcgggtgtgctatggatggcttctaacaaaaactacacatatgtattcctgatcgccaacctttcccccaccagctaaggacatttcccagggttaatagggcctggtccctgggaggaaatttgaatgggtccattttgcccttccatagcctaatccctgggcattgytttccactgaggttgggggttggggtgtactagttacayatcttcaacagaccccctctagaaatttttcagatgcttctgggagacacccaaagggtgaagctatttatctgtagtaaactatttatctgtgtttttgaaatattaaaccctggatcagtcctttgatcagtataattttttaaagttactttgtcagaggcacaaaagggtttaaactgattcataataaatatctgtacttcttcgatcttcaccttttgtgctgtgattcttcagtttctaaaccagcactgtctgggtccctacaatgtatcaggaagagctgagaatggtaaggagactcttctaagtcttcatctcagagaccctgagttcccactcagacccactcagccaaatctcatggaagaccaaggagggcagcactgtttttgttttttgttttttgttttttttttttgacactgtccaaaggttttccatcctgtcctggaatcagagttggaagctgaggagcttcagcctcttttatggtttaatggccacctgttctctcctgtgaaaggctttgcaaagtcacattaagtttgcatgacctgttatccctggggccctatttcatagaggctggccctattagtgatttccaaaaacaatatggaagtgccttttgatgtcttacaataagagaagaagccaatggaaatgaaagagattggcaaaggggaaggatgatgccatgtagatcctgtttgacatttttatggctgtatttgtaaacttaaacacaccagtgtctgttcttgatgcagttgctatttaggatgagttaagtgcctggggagtccctcaaaaggttaaagggattcccatcattggaatcttatcaccagataggcaagtttatgaccaaacaagagagtactggctttatcctctaacctcatattttctcccacttggcaagtcctttgtggcatttattcatcagtcagggtgtccgattggtcctagaacttccaaaggctgcttgtcatagaagccattgcatctataaagcaacggctcctgttaaatggtatctcctttctgaggctcctactaaaagtcatttgttacctaaacttatgtgcttaacaggcaatgcttctcagaccacaaagcagaaagaagaagaaaagctcctgactaaatcagggctgggcttagacagagttgatctrtagaatatctttaaaggagagatgtcaactttctgcactattcccagcctctgctcctccctgtctaccctctcccctccctctctccctccacttcaccccacaatcttgaaaaacttcctttctcttctgtgaacatcattggccagatccattttcagtggtctggatttctttttattttcttttcaacttgaaagaaactggacattaggccactatgtgttgttactgccactagtgttcaagtgcctcttgttttcccagagatttcctgggtctgccagaggcccagacaggctcactcaagctctttaactgaaaagcaacaagccactccaggacaaggttcaaaatggttacaacagcctctacctgtcgccccagggagaaaggggtagtgatacaagtctcatagccagagatggttttccactccttctagatattcccaaaaagaggctgagacaggaggttattttcaattttattttggaattaaatacttttttccctttattactgttgtagtccctcacttggatatacctctgttttcacgatagaaataagggaggtctagagcttctattccttggccattgtcaacggagagctggccaagtcttcacaaacccttgcaacattgcctgaagtttatggaataagatgtattctcactcccttgatctcaagggcgtaactctggaagcacagcttgactacaygtcatttttaccaatgattttcaggtgacctgggctaagtcatttaaactgggtctttataaaagtaaaaggccaacatttaattattttgcaaagcaacctaagagctaaagatgtaatttttcttgcaattgtaaatcttttgtgtctcctgaagacttcccttaaaattagctctgagtgaaaaatcaaaagagacaaaagacatcttcgaatccatatttcaagcctggtagaattggcttttctagcagaacctttccaaaagttttatattgagattcataacaacaccaagaattgattttgtagccaacattcattcaatactgttatatcagaggagtaggagagaggaaacatttgacttatctggaaaagcaaaatgtacttaagaataagaataacatggtccattcacctttatgttatagatatgtctttgtgtaaatcatttgttttgagttttcaaagaatagcccattgttcattcttgtgctgtacaatgaccactgttattgttactttgacttttcagagcacacccttcctctggtttttgtatatttattgatggatcaataataatgaggaaagcatgatatgtatattgctgagttgaaagcacttattggaaaatattaaaaggctaacattaaaagactaaaggaaacagactcagaa

SEQ ID NO: 56 - DNA, 4335 bp, Homo sapiens
gagaagaaagccagtgcgtctctgggcgcaggggccagtggggctcggaggcacaggcaccccgcgacactccaggttccccgacccacgtccctggcagccccgattatttacagcctcagcagagcacggggcgggggcagaggggcccgcccgggagggctgctacttcttaaaacctctgckggctgcttagtcacagccccccttgcttgggtgtgtccttcgctcgctccctccctccgtcttaggtcactgttttcaacctcgaataaaaactgcagccaacttccgaggcagcctcattgcccagcggaccccagcctctgccaggttcggtccgccatcctcgtcccgtcctccgccggcccctgccccgcgcccagggatcctccagctcctttcgcccgcgccctccgttcgctccggacaccatggacaagttttggtggcacgcagcctggggactctgcctcgtgccgctgagcctggcgcagatcgatttgaatataacctgccgctttgcaggtgtattccacgtggagaaaaatggtcgctacagcatctctcggacggaggccgctgacctctgcaaggctttcaatagcaccttgcccacaatggcccagatggagaaagctctgagcatcggatttgagacctgcaggtatgggttcatagaagggcaygtggtgattccccggatccaccccaactccatctgtgcagcaaacaacacaggggtgtacatcctcacatmcaacacctcccagtatgacacatattgcttcaatgcttcagctccacctgaagaagattgtacatcagtcacagacctgcccaatgcctttgatggaccaattaccataactattgttaaccgtgatggcacccgctatgtccagaaaggagaatacagaacgaatcctgaagacatctaccccagcaaccctactgatgatgacgtgagcagcggctcctccagtgaaaggagcagcacttcaggaggttacatcttttacaccttttctactgtacaccccatcccagacgaagacagtccctggatcaccgacagcacagacagaatccctgctaccagagaccaagacacattccaccccagtggggggtcccataccactcatggatctgaatcagatggacactcacatgggagtcaagaaggtggagcaaacacaacctctggtcctataaggacaccccaaattccagaatggctgatcatcttggcatccctcttggccttggctttgattcttgcagtttgcattgcagtcaacagtcgaagaaggtgtgggcagaagaaaaagctagtgatcaacagtggcaatggagctgtggaggacagaaagccaagtggactcaacggagaggccagcaagtctcaggaaatggtgcatttggtgaacaaggagtcgtcagaaactccagaccagtttatgacagctgatgagacaaggaacctgcagaatgtggacatgaagattggggtgtaacacctacaccattatcttggaaagaaacaaccgttggaaacataaccattacagggagctgggacacttaacagatgcaatgtgctactgattgtttcattgcgaatcttttttagcataaaattttctactytttcccccaccagctaaggacatttcccagggttaatagggcctggtccctgggaggaaatttgaatgggtccattttgcccttccatagcctaatccctgggcattgytttccactgaggttgggggttggggtgtactagttacayatcttcaacagaccccctctagaaatttttcagatgcttctgggagacacccaaagggtgaagctatttatctgtagtaaactatttatctgtgtttttgaaatattaaaccctggatcagtcctttgatcagtataattttttaaagttactttgtcagaggcacaaaagggtttaaactgattcataataaatatctgtacttcttcgatcttcaccttttgtgctgtgattcttcagtttctaaaccagcactgtctgggtccctacaatgtatcaggaagagctgagaatggtaaggagactcttctaagtcttcatctcagagaccctgagttcccactcagacccactcagccaaatctcatggaagaccaaggagggcagcactgtttttgttttttgttttttacactgtccaaaggttttccatcctgtcctggaatcagagttggaagctgaggagcttcagcctcttttatggtttaatggccacctgttctctcctgtgaaaggctttgcaaagtcacattaagtttgcatgacctgttatccctggggccctatttcatagaggctggccctattagtgatttccaaaaacaatatggaagtgccttttgatgtcttacaataagagaagaagccaatggaaatgaaagagattggcaaaggggaaggatgatgccatgtagatcctgtttgacatttttatggctgtatttgtaaacttaaacacaccagtgtctgttcttgatgcagttgctatttaggatgagttaagtgcctggggagtccctcaaaaggttaaagggattcccatcattggaatcttatcaccagataggcaagtttatgaccaaacaagagagtactggctttatcctctaacctcatattttctcccacttggcaagtcctttgtggcatttattcatcagtcagggtgtccgattggtcctagaacttccaaaggctgcttgtcatagaagccattgcatctataaagcaacggctcctgttaaatggtatctcctttctgaggctcctactaaaagtcatttgttacctaaacttatgtgcttaacaggcaatgcttctcagaccacaaagcagaaagaagaagaaaagctcctgactaaatcagggctgggcttagacagagttgatctrtagaatatctttaaaggagagatgtcaactttctgcactattcccagcctctgctcctccctgtctaccctctcccctccctctctccctccacttcaccccacaatctttggtctggatttctttttattttcttttcaacttgaaagaaactggacattaggccactatgtgttgttactgccactagtgttcaagtgcctcttgttttcccagagatttcctgggtctgccagaggcccagacaggctcactcaagctctttaactgaaaagcaacaagccactccaggacaaggttcaaaatggttacaacagcctctacctgtcgccccagggagaaaggggtagtgatacaagtctcatagccagagatggttttccactccttctagatattcccaaaaagaggctgagacaggaggttattttcaattttattttggaattaaatacttttttccctttattactgttgtagtccctcacttggatatacctctgttttcacgatagaaataagggaggtctagagcttctattccttggccattgtcaacggagagctggccaagtcttcacaaacccttgcaacattgcctgaagtttatggaataagatgtattctcactcccttgatctcaagggcgtaactctggaagcacagcttgactacaygtcatttttaccaatgattttcaggtgacctgggctaagtcatttaaactgggtctttataaaagtaaaaggccaacatttaattattttgcaaagcaacctaagagctaaagatgtaatttttcttgcaattgtaaatcttttgtgtctcctgaagacttcccttaaaattagctctgagtgaaaaatcaaaagagacaaaagacatcttcgaatccatatttcaagcctggtagaattggcttttctagcagaacctttccaaaagttttatattgagattcataacaacaccaagaattgattttgtagccaacattcattcaatactgttatatcagaggagtaggagagaggaaacatttgacttatctggaaaagcaaaatgtacttaagaataagaataacatggtccattcacctttatgttatagatatgtctttgtgtaaatcatttgttttgagttttcaaagaatagcccattgttcattcttgtgctgtacaatgaccactgttattgttactttgacttttcagagcacacccttcctctggtttttgtatatttattgatggatcaataataatgaggaaagcatgatatgtatattgctgagttgaaagcacttattggaaaatattaaaaggctaacattaaaagactaaaggaaacagactcagaa

SEQ ID NO: 57 - DNA, 5452 bp, Homo sapiens
gagaagaaagccagtgcgtctctgggcgcaggggccagtggggctcggaggcacaggcaccccgcgacactccaggttccccgacccacgtccctggcagccccgattatttacagcctcagcagagcacggggcgggggcagaggggcccgcccgggagggctgctacttcttaaaacctctgckggctgcttagtcacagccccccttgcttgggtgtgtccttcgctcgctccctccctccgtcttaggtcactgttttcaacctcgaataaaaactgcagccaacttccgaggcagcctcattgcccagcggaccccagcctctgccaggttcggtccgccatcctcgtcccgtcctccgccggcccctgccccgcgcccagggatcctccagctcctttcgcccgcgccctccgttcgctccggacaccatggacaagttttggtggcacgcagcctggggactctgcctcgtgccgctgagcctggcgcagatcgatttgaatataacctgccgctttgcaggtgtattccacgtggagaaaaatggtcgctacagcatctctcggacggaggccgctgacctctgcaaggctttcaatagcaccttgcccacaatggcccagatggagaaagctctgagcatcggatttgagacctgcaggtatgggttcatagaagggcaygtggtgattccccggatccaccccaactccatctgtgcagcaaacaacacaggggtgtacatcctcacatmcaacacctcccagtatgacacatattgcttcaatgcttcagctccacctgaagaagattgtacatcagtcacagacctgcccaatgcctttgatggaccaattaccataactattgttaaccgtgatggcacccgctatgtccagaaaggagaatacagaacgaatcctgaagacatctaccccagcaaccctactgatgatgacgtgagcagcggctcctccagtgaaaggagcagcacttcaggagctttgatgagcactagtgctacagcaactgagacagcaaccaagaggcaagaaacctgggattggttytcatggttgtttctaccatcagagtcaaagaatcatcttcacacaacaacacaaatggctggtacgtcttcaaataccatctcagcaggctgggagccaaatgaagaaaatgaagatgaaagagacagacacctcagtttttctggatcaggcattgatgatgatgaagattttatctccagcaccatttcaaccacaccacgggcttttgaccacacaaaacagaaccaggactggacycagtggaacccaagccattcaaatccggaagtgctacttcagacaaccacaaggatgactgatgtagacagaaatggcaccactgcttatgaaggaaactggaacccagaagcacaccctcccctcattcaccatgagcatcatgargaagaagagaccccacattctacaagcacaacagcctcagctcatamcagccatccaatgcaaggaaggacaacaccaagcccagaggacagttcctggactgatttcttcaacccaatctcacaccccatgggacgaggtcatcaagcaggaagaaggatggatatggactccagtcatagtayaacgcttcagcctactgcaaatccaaacacaggtttggtggaagatttggacaggacaggacctctttcaatgacaacgcagcagagtaattctcagagcttctctacatcacatgaaggcttggaagaagataaagaccatccaacaacttctactctgacatcaagcaataggaatgatgtcacaggtggaagaagagacccaaatcattctgaaggctcaactactttactggaaggttatacctctcattacccacacacgaaggaaagcaggaccttcatcccagtgacctcagctaagactgggtcctttggagttactgcagttactgttggagattccaactctaatgtcaatcgttccttatcaggagaccaagacacattccaccccagtggggggtcccataccactcatggatctgaatcagatggacactcacatgggagtcaagaaggtggagcaaacacaacctctggtcctataaggacaccccaaattccagaatggctgatcatcttggcatccctcttggccttggctttgattcttgcagtttgcattgcagtcaacagtcgaagaaggtgtgggcagaagaaaaagctagtgatcaacagtggcaatggagctgtggaggacagaaagccaagtggactcaacggagaggccagcaagtctcaggaaatggtgcatttggtgaacaaggagtcgtcagaaactccagaccagtttatgacagctgatgagacaaggaacctgcagaatgtggacatgaagattggggtgtaacacctacaccattatcttggaaagaaacaaccgttggaaacataaccattacagggagctgggacacttaacagatgcaatgtgctactgattgtttcattgcgaatcttttttagcataaaattttctactyttttygttttttgtgttttgttctttaaagtcaggtccaatttgtaaaaacagcattgctttctgaaattagggcccaattaataatcagcaagaatttgatcgttccagttcccacttggaggcctttcatccctcgggtgtgctatggatggcttctaacaaaaactacacatatgtattcctgatcgccaacctttcccccaccagctaaggacatttcccagggttaatagggcctggtccctgggaggaaatttgaatgggtccattttgcccttccatagcctaatccctgggcattgytttccactgaggttgggggttggggtgtactagttacayatcttcaacagaccccctctagaaatttttcagatgcttctgggagacacccaaagggtgaagctatttatctgtagtaaactatttatctgtgtttttgaaatattaaaccctggatcagtcctttgatcagtataattttttaaagttactttgtcagaggcacaaaagggtttaaactgattcataataaatatctgtacttcttcgatcttcaccttttgtgctgtgattcttcagtttctaaaccagcactgtctgggtccctacaatgtatcaggaagagctgagaatggtaaggagactcttctaagtcttcatctcagagaccctgagttcccactcagacccactcagccaaatctcatggaagaccaaggagggcagcactgtttttgttttttgttttttacactgtccaaaggttttccatcctgtcctggaatcagagttggaagctgaggagcttcagcctcttttatggtttaatggccacctgttctctcctgtgaaaggctttgcaaagtcacattaagtttgcatgacctgttatccctggggccctatttcatagaggctggccctattagtgatttccaaaaacaatatggaagtgccttttgatgtcttacaataagagaagaagccaatggaaatgaaagagattggcaaaggggaaggatgatgccatgtagatcctgtttgacatttttatggctgtatttgtaaacttaaacacaccagtgtctgttcttgatgcagttgctatttaggatgagttaagtgcctggggagtccctcaaaaggttaaagggattcccatcattggaatcttatcaccagataggcaagtttatgaccaaacaagagagtactggctttatcctctaacctcatattttctcccacttggcaagtcctttgtggcatttattcatcagtcagggtgtccgattggtcctagaacttccaaaggctgcttgtcatagaagccattgcatctataaagcaacggctcctgttaaatggtatctcctttctgaggctcctactaaaagtcatttgttacctaaacttatgtgcttaacaggcaatgcttctcagaccacaaagcagaaagaagaagaaaagctcctgactaaatcagggctgggcttagacagagttgatctrtagaatatctttaaaggagagatgtcaactttctgcactattcccagcctctgctcctccctgtctaccctctcccctccctctctccctccacttcaccccacaatctttggtctggatttctttttattttcttttcaacttgaaagaaactggacattaggccactatgtgttgttactgccactagtgttcaagtgcctcttgttttcccagagatttcctgggtctgccagaggcccagacaggctcactcaagctctttaactgaaaagcaacaagccactccaggacaaggttcaaaatggttacaacagcctctacctgtcgccccagggagaaaggggtagtgatacaagtctcatagccagagatggttttccactccttctagatattcccaaaaagaggctgagacaggaggttattttcaattttattttggaattaaatacttttttccctttattactgttgtagtccctcacttggatatacctctgttttcacgatagaaataagggaggtctagagcttctattccttggccattgtcaacggagagctggccaagtcttcacaaacccttgcaacattgcctgaagtttatggaataagatgtattctcactcccttgatctcaagggcgtaactctggaagcacagcttgactacaygtcatttttaccaatgattttcaggtgacctgggctaagtcatttaaactgggtctttataaaagtaaaaggccaacatttaattattttgcaaagcaacctaagagctaaagatgtaatttttcttgcaattgtaaatcttttgtgtctcctgaagacttcccttaaaattagctctgagtgaaaaatcaaaagagacaaaagacatcttcgaatccatatttcaagcctggtagaattggcttttctagcagaacctttccaaaagttttatattgagattcataacaacaccaagaattgattttgtagccaacattcattcaatactgttatatcagaggagtaggagagaggaaacatttgacttatctggaaaagcaaaatgtacttaagaataagaataacatggtccattcacctttatgttatagatatgtctttgtgtaaatcatttgttttgagttttcaaagaatagcccattgttcattcttgtgctgtacaatgaccactgttattgttactttgacttttcagagcacacccttcctctggtttttgtatatttattgatggatcaataataatgaggaaagcatgatatgtatattgctgagttgaaagcacttattggaaaatattaaaaggctaacattaaaagactaaaggaaacagactcagaa

SEQ ID NO: 58 - DNA, 3858 bp, Homo sapiens
gagaagaaagccagtgcgtctctgggcgcaggggccagtggggctcggaggcacaggcaccccgcgacactccaggttccccgacccacgtccctggcagccccgattatttacagcctcagcagagcacggggcgggggcagaggggcccgcccgggagggctgctacttcttaaaacctctgckggctgcttagtcacagccccccttgcttgggtgtgtccttcgctcgctccctccctccgtcttaggtcactgttttcaacctcgaataaaaactgcagccaacttccgaggcagcctcattgcccagcggaccccagcctctgccaggttcggtccgccatcctcgtcccgtcctccgccggcccctgccccgcgcccagggatcctccagctcctttcgcccgcgccctccgttcgctccggacaccatggacaagttttggtggcacgcagcctggggactctgcctcgtgccgctgagcctggcgcagatcgatttgaatataacctgccgctttgcaggtgtattccacgtggagaaaaatggtcgctacagcatctctcggacggaggccgctgacctctgcaaggctttcaatagcaccttgcccacaatggcccagatggagaaagctctgagcatcggatttgagacctgcagtttgcattgcagtcaacagtcgaagaaggtgtgggcagaagaaaaagctagtgatcaacagtggcaatggagctgtggaggacagaaagccaagtggactcaacggagaggccagcaagtctcaggaaatggtgcatttggtgaacaaggagtcgtcagaaactccagaccagtttatgacagctgatgagacaaggaacctgcagaatgtggacatgaagattggggtgtaacacctacaccattatcttggaaagaaacaaccgttggaaacataaccattacagggagctgggacacttaacagatgcaatgtgctactgattgtttcattgcgaatcttttttagcataaaattttctactyttttygttttttgtgttttgttctttaaagtcaggtccaatttgtaaaaacagcattgctttctgaaattagggcccaattaataatcagcaagaatttgatcgttccagttcccacttggaggcctttcatccctcgggtgtgctatggatggcttctaagacatttcccagggttaatagggcctggtccctgggaggaaatttgaatgggtccattttgcccttccatagcctaatccctgggcattgytttccactgaggttgggggttggggtgtactagttacayatcttcaacagaccccctctagaaatttttcagatgcttctgggagacacccaaagggtgaagctatttatctgtagtaaactatttatctgtgtttttgaaatattaaaccctggatcagtcctttgatcagtataattttttaaagttactttgtcagaggcacaaaagggtttaaactgattcataataaatatctgtacttcttcgatcttcaccttttgtgctgtgattcttcagtttctaaaccagcactgtctgggtccctacaatgtatcaggaagagctgagaatggtaaggagactcttctaagtcttcatctcagagaccctgagttcccactcagacccactcagccaaatctcatggaagaccaaggagggcagcactgtttttgttttttgttttttacactgtccaaaggttttccatcctgtcctggaatcagagttggaagctgaggagcttcagcctcttttatggtttaatggccacctgttctctcctgtgaaaggctttgcaaagtcacattaagtttgcatgacctgttatccctggggccctatttcatagaggctggccctattagtgatttccaaaaacaatatggaagtgccttttgatgtcttacaataagagaagaagccaatggaaatgaaagagattggcaaaggggaaggatgatgccatgtagatcctgtttgacatttttatggctgtatttgtaaacttaaacacaccagtgtctgttcttgatgcagttgctatttaggatgagttaagtgcctggggagtccctcaaaaggttaaagggattcccatcattggaatcttatcaccagataggcaagtttatgaccaaacaagagagtactggctttatcctctaacctcatattttctcccacttggcaagtcctttgtggcatttattcatcagtcagggtgtccgattggtcctagaacttccaaaggctgcttgtcatagaagccattgcatctataaagcaacggctcctgttaaatggtatctcctttctgaggctcctactaaaagtcatttgttacctaaacttatgtgcttaacaggcaatgcttctcagaccacaaagcagaaagaagaagaaaagctcctgactaaatcagggctgggcttagacagagttgatctrtagaatatctttaaaggagagatgtcaactttctgcactattcccagcctctgctcctccctgtctaccctctcccctccctctctccctccacttcaccccacaatctttggtctggatttctttttattttcttttcaacttgaaagaaactggacattaggccactatgtgttgttactgccactagtgttcaagtgcctcttgttttcccagagatttcctgggtctgccagaggcccagacaggctcactcaagctctttaactgaaaagcaacaagccactccaggacaaggttcaaaatggttacaacagcctctacctgtcgccccagggagaaaggggtagtgatacaagtctcatagccagagatggttttccactccttctagatattcccaaaaagaggctgagacaggaggttattttcaattttattttggaattaaatacttttttccctttattactgttgtagtccctcacttggatatacctctgttttcacgatagaaataagggaggtctagagcttctattccttggccattgtcaacggagagctggccaagtcttcacaaacccttgcaacattgcctgaagtttatggaataagatgtattctcactcccttgatctcaagggcgtaactctggaagcacagcttgactacaygtcatttttaccaatgattttcaggtgacctgggctaagtcatttaaactgggtctttataaaagtaaaaggccaacatttaattattttgcaaagcaacctaagagctaaagatgtaatttttcttgcaattgtaaatcttttgtgtctcctgaagacttcccttaaaattagctctgagtgaaaaatcaaaagagacaaaagacatcttcgaatccatatttcaagcctggtagaattggcttttctagcagaacctttccaaaagttttatattgagattcataacaacaccaagaattgattttgtagccaacattcattcaatactgttatatcagaggagtaggagagaggaaacatttgacttatctggaaaagcaaaatgtacttaagaataagaataacatggtccattcacctttatgttatagatatgtctttgtgtaaatcatttgttttgagttttcaaagaatagcccattgttcattcttgtgctgtacaatgaccactgttattgttactttgacttttcagagcacacccttcctctggtttttgtatatttattgatggatcaataataatgaggaaagcatgatatgtatattgctgagttgaaagcacttattggaaaatattaaaaggctaacattaaaagactaaaggaaacagactcagaa

SEQ ID NO: 59 - DNA, 4874 bp, Homo sapiens
gagaagaaagccagtgcgtctctgggcgcaggggccagtggggctcggaggcacaggcaccccgcgacactccaggttccccgacccacgtccctggcagccccgattatttacagcctcagcagagcacggggcgggggcagaggggcccgcccgggagggctgctacttcttaaaacctctgckggctgcttagtcacagccccccttgcttgggtgtgtccttcgctcgctccctccctccgtcttaggtcactgttttcaacctcgaataaaaactgcagccaacttccgaggcagcctcattgcccagcggaccccagcctctgccaggttcggtccgccatcctcgtcccgtcctccgccggcccctgccccgcgcccagggatcctccagctcctttcgcccgcgccctccgttcgctccggacaccatggacaagttttggtggcacgcagcctggggactctgcctcgtgccgctgagcctggcgcagatcgatttgaatataacctgccgctttgcaggtgtattccacgtggagaaaaatggtcgctacagcatctctcggacggaggccgctgacctctgcaaggctttcaatagcaccttgcccacaatggcccagatggagaaagctctgagcatcggatttgagacctgcaggtatgggttcatagaagggcaygtggtgattccccggatccaccccaactccatctgtgcagcaaacaacacaggggtgtacatcctcacatmcaacacctcccagtatgacacatattgcttcaatgcttcagctccacctgaagaagattgtacatcagtcacagacctgcccaatgcctttgatggaccaattaccataactattgttaaccgtgatggcacccgctatgtccagaaaggagaatacagaacgaatcctgaagacatctaccccagcaaccctactgatgatgacgtgagcagcggctcctccagtgaaaggagcagcacttcaggaggttacatcttttacaccttttctactgtacaccccatcccagacgaagacagtccctggatcaccgacagcacagacagaatccctgctaccaatatggactccagtcatagtayaacgcttcagcctactgcaaatccaaacacaggtttggtggaagatttggacaggacaggacctctttcaatgacaacgcagcagagtaattctcagagcttctctacatcacatgaaggcttggaagaagataaagaccatccaacaacttctactctgacatcaagcaataggaatgatgtcacaggtggaagaagagacccaaatcattctgaaggctcaactactttactggaaggttatacctctcattacccacacacgaaggaaagcaggaccttcatcccagtgacctcagctaagactgggtcctttggagttactgcagttactgttggagattccaactctaatgtcaatcgttccttatcaggagaccaagacacattccaccccagtggggggtcccataccactcatggatctgaatcagatggacactcacatgggagtcaagaaggtggagcaaacacaacctctggtcctataaggacaccccaaattccagaatggctgatcatcttggcatccctcttggccttggctttgattcttgcagtttgcattgcagtcaacagtcgaagaaggtgtgggcagaagaaaaagctagtgatcaacagtggcaatggagctgtggaggacagaaagccaagtggactcaacggagaggccagcaagtctcaggaaatggtgcatttggtgaacaaggagtcgtcagaaactccagaccagtttatgacagctgatgagacaaggaacctgcagaatgtggacatgaagattggggtgtaacacctacaccattatcttggaaagaaacaaccgttggaaacataaccattacagggagctgggacacttaacagatgcaatgtgctactgattgtttcattgcgaatcttttttagcataaaattttctactyttttygttttttgtgttttgttctttaaagtcaggtccaatttgtaaaaacagcattgctttctgaaattagggcccaattaataatcagcaagaatttgatcgttccagttcccacttggaggcctttcatccctcgggtgtgctatggatggcttctaagacatttcccagggttaatagggcctggtccctgggaggaaatttgaatgggtccattttgcccttccatagcctaatccctgggcattgytttccactgaggttgggggttggggtgtactagttacayatcttcaacagaccccctctagaaatttttcagatgcttctgggagacacccaaagggtgaagctatttatctgtagtaaactatttatctgtgtttttgaaatattaaaccctggatcagtcctttgatcagtataattttttaaagttactttgtcagaggcacaaaagggtttaaactgattcataataaatatctgtacttcttcgatcttcaccttttgtgctgtgattcttcagtttctaaaccagcactgtctgggtccctacaatgtatcaggaagagctgagaatggtaaggagactcttctaagtcttcatctcagagaccctgagttcccactcagacccactcagccaaatctcatggaagaccaaggagggcagcactgtttttgttttttgttttttacactgtccaaaggttttccatcctgtcctggaatcagagttggaagctgaggagcttcagcctcttttatggtttaatggccacctgttctctcctgtgaaaggctttgcaaagtcacattaagtttgcatgacctgttatccctggggccctatttcatagaggctggccctattagtgatttccaaaaacaatatggaagtgccttttgatgtcttacaataagagaagaagccaatggaaatgaaagagattggcaaaggggaaggatgatgccatgtagatcctgtttgacatttttatggctgtatttgtaaacttaaacacaccagtgtctgttcttgatgcagttgctatttaggatgagttaagtgcctggggagtccctcaaaaggttaaagggattcccatcattggaatcttatcaccagataggcaagtttatgaccaaacaagagagtactggctttatcctctaacctcatattttctcccacttggcaagtcctttgtggcatttattcatcagtcagggtgtccgattggtcctagaacttccaaaggctgcttgtcatagaagccattgcatctataaagcaacggctcctgttaaatggtatctcctttctgaggctcctactaaaagtcatttgttacctaaacttatgtgcttaacaggcaatgcttctcagaccacaaagcagaaagaagaagaaaagctcctgactaaatcagggctgggcttagacagagttgatctrtagaatatctttaaaggagagatgtcaactttctgcactattcccagcctctgctcctccctgtctaccctctcccctccctctctccctccacttcaccccacaatctttggtctggatttctttttattttcttttcaacttgaaagaaactggacattaggccactatgtgttgttactgccactagtgttcaagtgcctcttgttttcccagagatttcctgggtctgccagaggcccagacaggctcactcaagctctttaactgaaaagcaacaagccactccaggacaaggttcaaaatggttacaacagcctctacctgtcgccccagggagaaaggggtagtgatacaagtctcatagccagagatggttttccactccttctagatattcccaaaaagaggctgagacaggaggttattttcaattttattttggaattaaatacttttttccctttattactgttgtagtccctcacttggatatacctctgttttcacgatagaaataagggaggtctagagcttctattccttggccattgtcaacggagagctggccaagtcttcacaaacccttgcaacattgcctgaagtttatggaataagatgtattctcactcccttgatctcaagggcgtaactctggaagcacagcttgactacaygtcatttttaccaatgattttcaggtgacctgggctaagtcatttaaactgggtctttataaaagtaaaaggccaacatttaattattttgcaaagcaacctaagagctaaagatgtaatttttcttgcaattgtaaatcttttgtgtctcctgaagacttcccttaaaattagctctgagtgaaaaatcaaaagagacaaaagacatcttcgaatccatatttcaagcctggtagaattggcttttctagcagaacctttccaaaagttttatattgagattcataacaacaccaagaattgattttgtagccaacattcattcaatactgttatatcagaggagtaggagagaggaaacatttgacttatctggaaaagcaaaatgtacttaagaataagaataacatggtccattcacctttatgttatagatatgtctttgtgtaaatcatttgttttgagttttcaaagaatagcccattgttcattcttgtgctgtacaatgaccactgttattgttactttgacttttcagagcacacccttcctctggtttttgtatatttattgatggatcaataataatgaggaaagcatgatatgtatattgctgagttgaaagcacttattggaaaatattaaaaggctaacattaaaagactaaaggaaacagactcagaa

SEQ ID NO: 60 - DNA, 5468 bp, Homo sapiens
gagaagaaagccagtgcgtctctgggcgcaggggccagtggggctcggaggcacaggcaccccgcgacactccaggttccccgacccacgtccctggcagccccgattatttacagcctcagcagagcacggggcgggggcagaggggcccgcccgggagggctgctacttcttaaaacctctgckggctgcttagtcacagccccccttgcttgggtgtgtccttcgctcgctccctccctccgtcttaggtcactgttttcaacctcgaataaaaactgcagccaacttccgaggcagcctcattgcccagcggaccccagcctctgccaggttcggtccgccatcctcgtcccgtcctccgccggcccctgccccgcgcccagggatcctccagctcctttcgcccgcgccctccgttcgctccggacaccatggacaagttttggtggcacgcagcctggggactctgcctcgtgccgctgagcctggcgcagatcgatttgaatataacctgccgctttgcaggtgtattccacgtggagaaaaatggtcgctacagcatctctcggacggaggccgctgacctctgcaaggctttcaatagcaccttgcccacaatggcccagatggagaaagctctgagcatcggatttgagacctgcaggtatgggttcatagaagggcaygtggtgattccccggatccaccccaactccatctgtgcagcaaacaacacaggggtgtacatcctcacatmcaacacctcccagtatgacacatattgcttcaatgcttcagctccacctgaagaagattgtacatcagtcacagacctgcccaatgcctttgatggaccaattaccataactattgttaaccgtgatggcacccgctatgtccagaaaggagaatacagaacgaatcctgaagacatctaccccagcaaccctactgatgatgacgtgagcagcggctcctccagtgaaaggagcagcacttcaggaggttacatcttttacaccttttctactgtacaccccatcccagacgaagacagtccctggatcaccgacagcacagacagaatccctgctaccactttgatgagcactagtgctacagcaactgagacagcaaccaagaggcaagaaacctgggattggttytcatggttgtttctaccatcagagtcaaagaatcatcttcacacaacaacacaaatggctgcaggctgggagccaaatgaagaaaatgaagatgaaagagacagacacctcagtttttctggatcaggcattgatgatgatgaagattttatctccagcaccatttcaaccacaccacgggcttttgaccacacaaaacagaaccaggactggacycagtggaacccaagccattcaaatccggaagtgctacttcagacaaccacaaggatgactgatgtagacagaaatggcaccactgcttatgaaggaaactggaacccagaagcacaccctcccctcattcaccatgagcatcatgargaagaagagaccccacattctacaagcacaacagcctcagctcatamcagccatccaatgcaaggaaggacaacaccaagcccagaggacagttcctggactgatttcttcaacccaatctcacaccccatgggacgaggtcatcaagcaggaagaaggatggatatggactccagtcatagtayaacgcttcagcctactgcaaatccaaacacaggtttggtggaagatttggacaggacaggacctctttcaatgacaacgcagcagagtaattctcagagcttctctacatcacatgaaggcttggaagaagataaagaccatccaacaacttctactctgacatcaagcaataggaatgatgtcacaggtggaagaagagacccaaatcattctgaaggctcaactactttactggaaggttatacctctcattacccacacacgaaggaaagcaggaccttcatcccagtgacctcagctaagactgggtcctttggagttactgcagttactgttggagattccaactctaatgtcaatcgttccttatcaggagaccaagacacattccaccccagtggggggtcccataccactcatggatctgaatcagatggacactcacatgggagtcaagaaggtggagcaaacacaacctctggtcctataaggacaccccaaattccagaatggctgatcatcttggcatccctcttggccttggctttgattcttgcagtttgcattgcagtcaacagtcgaagaaggtgtgggcagaagaaaaagctagtgatcaacagtggcaatggagctgtggaggacagaaagccaagtggactcaacggagaggccagcaagtctcaggaaatggtgcatttggtgaacaaggagtcgtcagaaactccagaccagtttatgacagctgatgagacaaggaacctgcagaatgtggacatgaagattggggtgtaacacctacaccattatcttggaaagaaacaaccgttggaaacataaccattacagggagctgggacacttaacagatgcaatgtgctactgattgtttcattgcgaatcttttttagcataaaattttctactyttttygttttttgtgttttgttctttaaagtcaggtccaatttgtaaaaacagcattgctttctgaaattagggcccaattaataatcagcaagaatttgatcgttccagttcccacttggaggcctttcatccctcgggtgtgctatggatggcttctaagacatttcccagggttaatagggcctggtccctgggaggaaatttgaatgggtccattttgcccttccatagcctaatccctgggcattgytttccactgaggttgggggttggggtgtactagttacayatcttcaacagaccccctctagaaatttttcagatgcttctgggagacacccaaagggtgaagctatttatctgtagtaaactatttatctgtgtttttgaaatattaaaccctggatcagtcctttgatcagtataattttttaaagttactttgtcagaggcacaaaagggtttaaactgattcataataaatatctgtacttcttcgatcttcaccttttgtgctgtgattcttcagtttctaaaccagcactgtctgggtccctacaatgtatcaggaagagctgagaatggtaaggagactcttctaagtcttcatctcagagaccctgagttcccactcagacccactcagccaaatctcatggaagaccaaggagggcagcactgtttttgttttttgttttttacactgtccaaaggttttccatcctgtcctggaatcagagttggaagctgaggagcttcagcctcttttatggtttaatggccacctgttctctcctgtgaaaggctttgcaaagtcacattaagtttgcatgacctgttatccctggggccctatttcatagaggctggccctattagtgatttccaaaaacaatatggaagtgccttttgatgtcttacaataagagaagaagccaatggaaatgaaagagattggcaaaggggaaggatgatgccatgtagatcctgtttgacatttttatggctgtatttgtaaacttaaacacaccagtgtctgttcttgatgcagttgctatttaggatgagttaagtgcctggggagtccctcaaaaggttaaagggattcccatcattggaatcttatcaccagataggcaagtttatgaccaaacaagagagtactggctttatcctctaacctcatattttctcccacttggcaagtcctttgtggcatttattcatcagtcagggtgtccgattggtcctagaacttccaaaggctgcttgtcatagaagccattgcatctataaagcaacggctcctgttaaatggtatctcctttctgaggctcctactaaaagtcatttgttacctaaacttatgtgcttaacaggcaatgcttctcagaccacaaagcagaaagaagaagaaaagctcctgactaaatcagggctgggcttagacagagttgatctrtagaatatctttaaaggagagatgtcaactttctgcactattcccagcctctgctcctccctgtctaccctctcccctccctctctccctccacttcaccccacaatctttggtctggatttctttttattttcttttcaacttgaaagaaactggacattaggccactatgtgttgttactgccactagtgttcaagtgcctcttgttttcccagagatttcctgggtctgccagaggcccagacaggctcactcaagctctttaactgaaaagcaacaagccactccaggacaaggttcaaaatggttacaacagcctctacctgtcgccccagggagaaaggggtagtgatacaagtctcatagccagagatggttttccactccttctagatattcccaaaaagaggctgagacaggaggttattttcaattttattttggaattaaatacttttttccctttattactgttgtagtccctcacttggatatacctctgttttcacgatagaaataagggaggtctagagcttctattccttggccattgtcaacggagagctggccaagtcttcacaaacccttgcaacattgcctgaagtttatggaataagatgtattctcactcccttgatctcaagggcgtaactctggaagcacagcttgactacaygtcatttttaccaatgattttcaggtgacctgggctaagtcatttaaactgggtctttataaaagtaaaaggccaacatttaattattttgcaaagcaacctaagagctaaagatgtaatttttcttgcaattgtaaatcttttgtgtctcctgaagacttcccttaaaattagctctgagtgaaaaatcaaaagagacaaaagacatcttcgaatccatatttcaagcctggtagaattggcttttctagcagaacctttccaaaagttttatattgagattcataacaacaccaagaattgattttgtagccaacattcattcaatactgttatatcagaggagtaggagagaggaaacatttgacttatctggaaaagcaaaatgtacttaagaataagaataacatggtccattcacctttatgttatagatatgtctttgtgtaaatcatttgttttgagttttcaaagaatagcccattgttcattcttgtgctgtacaatgaccactgttattgttactttgacttttcagagcacacccttcctctggtttttgtatatttattgatggatcaataataatgaggaaagcatgatatgtatattgctgagttgaaagcacttattggaaaatattaaaaggctaacattaaaagactaaaggaaacagactcagaa

SEQ ID NO: 61 - DNA, 4633 bp, Homo sapiens
gagaagaaagccagtgcgtctctgggcgcaggggccagtggggctcggaggcacaggcaccccgcgacactccaggttccccgacccacgtccctggcagccccgattatttacagcctcagcagagcacggggcgggggcagaggggcccgcccgggagggctgctacttcttaaaacctctgckggctgcttagtcacagccccccttgcttgggtgtgtccttcgctcgctccctccctccgtcttaggtcactgttttcaacctcgaataaaaactgcagccaacttccgaggcagcctcattgcccagcggaccccagcctctgccaggttcggtccgccatcctcgtcccgtcctccgccggcccctgccccgcgcccagggatcctccagctcctttcgcccgcgccctccgttcgctccggacaccatggacaagttttggtggcacgcagcctggggactctgcctcgtgccgctgagcctggcgcagatcgatttgaatataacctgccgctttgcaggtgtattccacgtggagaaaaatggtcgctacagcatctctcggacggaggccgctgacctctgcaaggctttcaatagcaccttgcccacaatggcccagatggagaaagctctgagcatcggatttgagacctgcaggtatgggttcatagaagggcaygtggtgattccccggatccaccccaactccatctgtgcagcaaacaacacaggggtgtacatcctcacatmcaacacctcccagtatgacacatattgcttcaatgcttcagctccacctgaagaagattgtacatcagtcacagacctgcccaatgcctttgatggaccaattaccataactattgttaaccgtgatggcacccgctatgtccagaaaggagaatacagaacgaatcctgaagacatctaccccagcaaccctactgatgatgacgtgagcagcggctcctccagtgaaaggagcagcacttcaggaggttacatcttttacaccttttctactgtacaccccatcccagacgaagacagtccctggatcaccgacagcacagacagaatccctgctaccaatatggactccagtcatagtayaacgcttcagcctactgcaaatccaaacacaggtttggtggaagatttggacaggacaggacctctttcaatgacaacgcgagaccaagacacattccaccccagtggggggtcccataccactcatggatctgaatcagatggacactcacatgggagtcaagaaggtggagcaaacacaacctctggtcctataaggacaccccaaattccagaatggctgatcatcttggcatccctcttggccttggctttgattcttgcagtttgcattgcagtcaacagtcgaagaaggtgtgggcagaagaaaaagctagtgatcaacagtggcaatggagctgtggaggacagaaagccaagtggactcaacggagaggccagcaagtctcaggaaatggtgcatttggtgaacaaggagtcgtcagaaactccagaccagtttatgacagctgatgagacaaggaacctgcagaatgtggacatgaagattggggtgtaacacctacaccattatcttggaaagaaacaaccgttggaaacataaccattacagggagctgggacacttaacagatgcaatgtgctactgattgtttcattgcgaatcttttttagcataaaattttctactyttttygttttttgtgttttgttctttaaagtcaggtccaatttgtaaaaacagcattgctttctgaaattagggcccaattaataatcagcaagaatttgatcgttccagttcccacttggaggcctttcatccctcgggtgtgctatggatggcttctaacaaaaactacacatatgtattcctgatcgccaacctttcccccaccagctaaggacatttcccagggttaatagggcctggtccctgggaggaaatttgaatgggtccattttgcccttccatagcctaatccctgggcattgytttccactgaggttgggggttggggtgtactagttacayatcttcaacagaccccctctagaaatttttcagatgcttctgggagacacccaaagggtgaagctatttatctgtagtaaactatttatctgtgtttttgaaatattaaaccctggatcagtcctttgatcagtataattttttaaagttactttgtcagaggcacaaaagggtttaaactgattcataataaatatctgtacttcttcgatcttcaccttttgtgctgtgattcttcagtttctaaaccagcactgtctgggtccctacaatgtatcaggaagagctgagaatggtaaggagactcttctaagtcttcatctcagagaccctgagttcccactcagacccactcagccaaatctcatggaagaccaaggagggcagcactgtttttgttttttgttttttacactgtccaaaggttttccatcctgtcctggaatcagagttggaagctgaggagcttcagcctcttttatggtttaatggccacctgttctctcctgtgaaaggctttgcaaagtcacattaagtttgcatgacctgttatccctggggccctatttcatagaggctggccctattagtgatttccaaaaacaatatggaagtgccttttgatgtcttacaataagagaagaagccaatggaaatgaaagagattggcaaaggggaaggatgatgccatgtagatcctgtttgacatttttatggctgtatttgtaaacttaaacacaccagtgtctgttcttgatgcagttgctatttaggatgagttaagtgcctggggagtccctcaaaaggttaaagggattcccatcattggaatcttatcaccagataggcaagtttatgaccaaacaagagagtactggctttatcctctaacctcatattttctcccacttggcaagtcctttgtggcatttattcatcagtcagggtgtccgattggtcctagaacttccaaaggctgcttgtcatagaagccattgcatctataaagcaacggctcctgttaaatggtatctcctttctgaggctcctactaaaagtcatttgttacctaaacttatgtgcttaacaggcaatgcttctcagaccacaaagcagaaagaagaagaaaagctcctgactaaatcagggctgggcttagacagagttgatctrtagaatatctttaaaggagagatgtcaactttctgcactattcccagcctctgctcctccctgtctaccctctcccctccctctctccctccacttcaccccacaatctttggtctggatttctttttattttcttttcaacttgaaagaaactggacattaggccactatgtgttgttactgccactagtgttcaagtgcctcttgttttcccagagatttcctgggtctgccagaggcccagacaggctcactcaagctctttaactgaaaagcaacaagccactccaggacaaggttcaaaatggttacaacagcctctacctgtcgccccagggagaaaggggtagtgatacaagtctcatagccagagatggttttccactccttctagatattcccaaaaagaggctgagacaggaggttattttcaattttattttggaattaaatacttttttccctttattactgttgtagtccctcacttggatatacctctgttttcacgatagaaataagggaggtctagagcttctattccttggccattgtcaacggagagctggccaagtcttcacaaacccttgcaacattgcctgaagtttatggaataagatgtattctcactcccttgatctcaagggcgtaactctggaagcacagcttgactacaygtcatttttaccaatgattttcaggtgacctgggctaagtcatttaaactgggtctttataaaagtaaaaggccaacatttaattattttgcaaagcaacctaagagctaaagatgtaatttttcttgcaattgtaaatcttttgtgtctcctgaagacttcccttaaaattagctctgagtgaaaaatcaaaagagacaaaagacatcttcgaatccatatttcaagcctggtagaattggcttttctagcagaacctttccaaaagttttatattgagattcataacaacaccaagaattgattttgtagccaacattcattcaatactgttatatcagaggagtaggagagaggaaacatttgacttatctggaaaagcaaaatgtacttaagaataagaataacatggtccattcacctttatgttatagatatgtctttgtgtaaatcatttgttttgagttttcaaagaatagcccattgttcattcttgtgctgtacaatgaccactgttattgttactttgacttttcagagcacacccttcctctggtttttgtatatttattgatggatcaataataatgaggaaagcatgatatgtatattgctgagttgaaagcacttattggaaaatattaaaaggctaacattaaaagactaaaggaaacagactcagaa

SEQ ID NO: 62 - DNA, 657 bp, Homo sapiens
tcggtgcacagggacggggtcgccgcccacgcgcgcttggttcagggagcccaggctgtccctacccgcggctacaaaagctcgccgagtcttcctgtccacccaatcgccccacatgtcagcggttggtcgcctcgcggtgcagtgctgggcacgcgagcccctcccgcagtcattctcagcacaagcaccagcctggagccccgcagcgacagagctgagagcccccaagccgcagaggtcgtgcggagcagaacagaagaaacacacgtgttcttgtgtgtaaacccagtccatggaagagaccgtctgcttgtccctcctgatctctgggcccagacaaccagtagtcaccattccaagtgaggggtggctgcaactctacagccccgttcgtctctcctcactgtcaaagctgctgagaccccagactcracacttgaaagaaacccatgtctgtgaagcacttgtggaccattcaagattgtggaagaatcactcaagagaaggagatagcaatatttgcagatatgcaaactggccccttgcakgcamatcctggagcacgtcctggagcctttagaggagacggctgctgctgttccagtctctccttaggcagacttgagtttctacccactcttcccaagcagccgc

SEQ ID NO: 63 - DNA, 2529 bp, Homo sapiens
acacacagccattgggggttgctcggatccgggactgccgcagggggtgccacagcagtgcctggcagcgtgggctgggaccttgtcactaaagcagagaagccacttcttctgggcccacgaggcagctgtcccatgctctgctgagcacggtggtgccatgcctctgcaactcctcctgttgctgatcctactgggccctggcaacagcttgcagctgtgggacacctgggcagatgaagccgagaaagccttgggtcccctgcttgcccgggaccrgagacaggccaccgaatatgagtacctagattatgatttcctgccagaaacggagcctccagaaatrctgaggaacagcactgacaccactcctctgactgggcctggaacccctgagtctaccactgtggagcctgctgcaaggcgttctactggcctggatgcaggaggggcagtcacagagctgaccacggagctggccaacatggggaacctgtccacggattcagcagctatggagatacagaccactcaaccagcagccacggaggcacagaccactcaaccagtgcccacggaggcacagaccactccactggcagccacagaggcacagacaactcgactgacggccacggaggcacagaccactccactggcagccacagaggcacagaccactccaccagcagccacggaagcacagaccactcaacccacaggcctggaggcacagaccactgcaccagcagccatggaggcacagaccactgcaccagcagccatggaagcacagaccactccaccagcagccatggaggcacagaccactcaaaccacagccatggaggcacagaccactgcaccagaagccacggaggcacagaccactcaayccacagccacggaggcacagaccactccactggcagccatggaggccctgtccacagaacccagtgccacagaggccctgtycrtggaacctactaccaaaagaggtctgttcatacccttttctgtgtcctctgttactcacaagggcattcccatggcagccagcaatttgtccgtcaactacccagtgggggccccagaccacatctctgtgaagcagtgcctgctggccatcctaatcttggcgctggtggccactatcttcttcgtgtgcactgtggtgctggcggtccgcctctcccgcaagggccacatgtaccccgtgcgtaattactcccccaccgagatggtctgcatctcatccctgttgcctgatgggggtgaggggccctctgccacagccaatgggggcctgtccaaggccaagagcccgggcctgacgccagagcccagggaggaccgtgagggggatgacctcaccctgcacagcttcctcccttagctcactctgccatctgttttggcaagaccccacctccacggkctctcctgggccacccctgagtgcccagaccccawtccacagctctgggcttcctcggagacccctggggatggggatcttcagggaaggaactctggccacccaaacaggacaagagcagcctggggccaagcagacgggcaagtggagccacctctttcctccctccgcggatgaagcccagccacatttcagccgaggtccaaggcaggaggccatttacttgagacagattctctcctttttcctgtcccccatcttctctgggtccctctaacatctcccatggctctccccgcttctcctggtcactggagtctcctccccatgtacccaaggaagatggagctcccccatcccacacgcactgcactgccattgtcttttggttgccatggtcaccaaacaggaagtggacattctaagggaggagtactgaagagtgacggacttctgaggctgtttcctgctgctcctctgacttggggcagcttgggtcttcttgggcacctctctgggaaaacccagggtgaggttcagcctgtgagggctgggatgggtttcgtgggcccaagggcagacctttctttgggactgtgtggaccaaggagcttccatctagtgacaagtgacccccagctatcgcctcttgccttcccctgtggccactttccagggtggactctgtcttgttcactgcagtatcccaactgcaggtccagtgcaggcaataaatatgtgatggacaaacgatagcggaatccttcaaggtttcaaggctgtctccttcaggcagccttcccggaattctccatccctcagtgcaggatgggggctggtcctcagctgtctgccctcagcccctggccccccaggaagcctctttcatgggctgttaggttgacttcagttttgcctcttggacaacagggggtcttgtacatccttgggtgaccaggaaaagttcaggctatggggggccaaagggagggctgccccttccccaccagtgaccactttattccacttcctccattacccagttttggcccacagagtttggtcccccccaaacctcggaccaatat

SEQ ID NO: 64 - DNA, 4066 bp, Homo sapiens
gaattcttagttgttttctttagaagaacatttctagggaataatacaagaagatttaggaatcattgaagttataaatctttggaatgagcaaactcagaatggtgctrcttgaagactctggatctgctgacttcagaagacattttgtcaacytgagtcccttcaccattactgtggtcttacttctcagtgcctgttttgtcaccagttctcttggaggaacagacaaggagctgaggctagtggatggtgaaaacaagtgtagcgggagagtggaagtgaaagtccaggaggagtggggaacggtgtgtaataatggctggagcatggaagcggtctctgtgatttgtaaccagctgggatgtccaactgctatcaaagcccctggatgggctaattccagtgcaggttctggacgcatttggatggatcatgtttcttgtcgtgggaatgagtcagctctttgggattgcaaacatgatggatggggaaagcatagtaactgtactcaccaacaagatgctggagtgacctgctcagatggatccaatttggaaatgaggctgacgcgtggagggaatatgtgttctggaagaatagagatcaaattccaaggacggtggggaacagtgtgtgatgataacttcaacatagatcatgcatctgtcatttgtagacaacttgaatgtggaagtgctgtcagtttctctggttcatctaattttggagaaggctctggaccaatctggtttgatgatcttatatgcaacggaaatgagtcagctctctggaactgcaaacatcaaggatggggaaagcataactgtgatcatgctgaggatgctggagtgatttgctcaaagggagcagatctgagcctgagactggtagatggagtcactgaatgttcaggaagattagaagtgagattccaaggrgaatgggggacaatatgtgatgacggctgggacagttacgatgctgctgtggcatgcaagcaactgggatgtccaactgccgtcacagccattggtcgagttaacgccagtaagggatttggacacatctggcttgacagcgtttcttgccagggacatgaacctgctrtctggcaatgtaaacaccatgaatggggaaagcattattgcaatcacaatgaagatgctggcgtgacatgttctgatggatcagatctggagctaagacttagaggtggaggcagccgctgtgctgggacagttgaggtggagattcagagactgttagggaaggtgtgtgacagaggctggggactgaaagaagctgatgtggtttgcaggcagctgggatgtggatctgcactcaaaacatcttatcaagtgtactccaaaatccaggcaacaaacacatggctgtttctaagtagctgtaacggaaatgaaacttctctttgggactgcaagaactggcaatggggtggacttacctgtgatcactatgaagaagccaaaattacctgctcagcccacagggaacccagactggttggaggggacattccctgttctggacgtgttgaagtgaagcatggtgacacgtggggctccatctgtgattcrgacttctctctggaagctgccagcgttctatgcagggaattacagtgtggcacagttgtctctatcctggggggagctcactttggagagggaaatggacagatctgggctgaagaattccagtgtgagggacatgagtcccatctttcactctgcccagtagcacccygcccagaaggaacttgtagccacarcagggatgttggagtagtctgctcaagatacacagaaattcgcttggtgaatggcaagaccccgtgtgagggcagagtggagctcaaaacgcttggtgcctggggatccctctgtaactctcactgggacatagaagatgcccatgttctttgccagcagcttaaatgtggagttgccctttctaccccaggaggagcacgttttggaaaaggaaatggtcagatctggaggcatatgtttcactgcactgggactgagcagcacatgggagattgtcctgtaactgctctaggtgcttcattatgtccttcagagcaagtggcctctgtaatctgctcaggaaaccagtcccaaacactgtcctcgtgcaattcatcgtctttgggcccaacaaggcctaccattccagaagaaagtgctgtggcctgcatagagagtggtcaacttcgcctggtaaatggaggaggtcgctgtgctgggagagtagagatctatcatgagggctcctggggcaccatctgtgatgacagctgggacctgagtgatgcccacgtggtttgcagacagctgggctgtggagaggccattaatgccactggttctgctcattttggggaaggaacagggcccatctggctggatgagatgaaatgcaatggaaaagaatcccgcatttggcagtgccattcacacggctgggggcagcaaaattgcaggcacaaggaggatgcgggagttatctgctcagaattcatgtctctgagactgaccagtgaagccagcagagaggcctgtgcagggcgtctggaagttttttacaatggagcttggggcactgttggcaagagtagcatgtctgaaaccactgtgggtgtggtgtgcaggcagytgggctgtgcagacaaagggaaaatcaaccctgcatctttagacaaggccatgtccattcccatgtgggtggacaatgttcagtgtccaaaaggacctgacaygctgtggcagtgcccatcatctccatgggagaagagactggccagcccctcggaggagacctggatcacatgtgacaacaagataagacttcaggaaggacccacttcctgttctggacgtgtggagatctggcatggaggttcctgggggacagtgtgtgatgactcttgggacttggacgatgctcaggtggtgtgtcaacaacttggctgtggtccagctttgaaagcattcaaagaagcagagtttggtcaggggactggacccgatatggctcaatgaagtgaagtgcaaagggaatgagtcttccttgtgggattgtcctgccagacgctggggccatagtgagtgtgggcacaaggaagacgctgcagtgaattgcacagatatttcagtgcagaaaaccccacaaaaagccacaacaggtcgctcatcccgtcagtcatcctttattgcagtcgggatccttggggttgttctgttggccattttcgtcgcattattcttcttgactaaaaagcgaagacagagacagcggcttgcagtttcctcaagaggagagaacttagtccaccaaattcaataccgggagatgaattcttgcctgaatgcagatgatctggacctaatgaattcctcaggaggccattctgagccacactgaaaaggaaaatgggaatttataacccagtgagttcagcctttaagataccttgatgaagacctggactattgaatggagcagaaattcacctctctcactgactattacagttgcatttttatggagttcttcttctcctaggattcctaagactgctgctgaatttataaaaattaagtttgtgaatgtgactacttagtggtgtatatgagactttcaagggaattaaataaataaataagaatgttattgatttgagtttgctttaattacttgtccttaattctattaatttctaaaygggcttcctaattttttgtagagtttcctagatgtattataatgtgttttatttgacagtgtttcaatttgcatatacagtactgtatattttttcttatttggtttgaataattttcctattaccaaataaaaataaatttwtttttactttagtttttctaagacaggaaaagttaatgatattgaagggtctgtaaataatatatggctaactttataaggcatgactcacaacgattctttaactgctttttgttactgtaattctgttcactagaataaaatgcagagccacacctggtgagggcac

SEQ ID NO: 65 - DNA, 4248 bp, Homo sapiens
gaattcttagttgttttctttagaagaacatttctagggaataatacaagaagatttaggaatcattgaagttataaatctttggaatgagcaaactcagaatggtgctrcttgaagactctggatctgctgacttcagaagacattttgtcaacytgagtcccttcaccattactgtggtcttacttctcagtgcctgttttgtcaccagttctcttggaggaacagacaaggagctgaggctagtggatggtgaaaacaagtgtagcgggagagtggaagtgaaagtccaggaggagtggggaacggtgtgtaataatggctggagcatggaagcggtctctgtgatttgtaaccagctgggatgtccaactgctatcaaagcccctggatgggctaattccagtgcaggttctggacgcatttggatggatcatgtttcttgtcgtgggaatgagtcagctctttgggattgcaaacatgatggatggggaaagcatagtaactgtactcaccaacaagatgctggagtgacctgctcagatggatccaatttggaaatgaggctgacgcgtggagggaatatgtgttctggaagaatagagatcaaattccaaggacggtggggaacagtgtgtgatgataacttcaacatagatcatgcatctgtcatttgtagacaacttgaatgtggaagtgctgtcagtttctctggttcatctaattttggagaaggctctggaccaatctggtttgatgatcttatatgcaacggaaatgagtcagctctctggaactgcaaacatcaaggatggggaaagcataactgtgatcatgctgaggatgctggagtgatttgctcaaagggagcagatctgagcctgagactggtagatggagtcactgaatgttcaggaagattagaagtgagattccaaggrgaatgggggacaatatgtgatgacggctgggacagttacgatgctgctgtggcatgcaagcaactgggatgtccaactgccgtcacagccattggtcgagttaacgccagtaagggatttggacacatctggcttgacagcgtttcttgccagggacatgaacctgctrtctggcaatgtaaacaccatgaatggggaaagcattattgcaatcacaatgaagatgctggcgtgacatgttctgatggatcagatctggagctaagacttagaggtggaggcagccgctgtgctgggacagttgaggtggagattcagagactgttagggaaggtgtgtgacagaggctggggactgaaagaagctgatgtggtttgcaggcagctgggatgtggatctgcactcaaaacatcttatcaagtgtactccaaaatccaggcaacaaacacatggctgtttctaagtagctgtaacggaaatgaaacttctctttgggactgcaagaactggcaatggggtggacttacctgtgatcactatgaagaagccaaaattacctgctcagcccacagggaacccagactggttggaggggacattccctgttctggacgtgttgaagtgaagcatggtgacacgtggggctccatctgtgattcrgacttctctctggaagctgccagcgttctatgcagggaattacagtgtggcacagttgtctctatcctggggggagctcactttggagagggaaatggacagatctgggctgaagaattccagtgtgagggacatgagtcccatctttcactctgcccagtagcacccygcccagaaggaacttgtagccacarcagggatgttggagtagtctgctcaagtaagacccagaaaacatctttaattggttctyatactgtgaaagggacagggttagggagtcatagctgtctttttctaaagccctgtctccttccaggatacacagaaattcgcttggtgaatggcaagaccccgtgtgagggcagagtggagctcaaaacgcttggtgcctggggatccctctgtaactctcactgggacatagaagatgcccatgttctttgccagcagcttaaatgtggagttgccctttctaccccaggaggagcacgttttggaaaaggaaatggtcagatctggaggcatatgtttcactgcactgggactgagcagcacatgggagattgtcctgtaactgctctaggtgcttcattatgtccttcagagcaagtggcctctgtaatctgctcaggaaaccagtcccaaacactgtcctcgtgcaattcatcgtctttgggcccaacaaggcctaccattccagaagaaagtgctgtggcctgcatagagagtggtcaacttcgcctggtaaatggaggaggtcgctgtgctgggagagtagagatctatcatgagggctcctggggcaccatctgtgatgacagctgggacctgagtgatgcccacgtggtttgcagacagctgggctgtggagaggccattaatgccactggttctgctcattttggggaaggaacagggcccatctggctggatgagatgaaatgcaatggaaaagaatcccgcatttggcagtgccattcacacggctgggggcagcaaaattgcaggcacaaggaggatgcgggagttatctgctcagaattcatgtctctgagactgaccagtgaagccagcagagaggcctgtgcagggcgtctggaagttttttacaatggagcttggggcactgttggcaagagtagcatgtctgaaaccactgtgggtgtggtgtgcaggcagytgggctgtgcagacaaagggaaaatcaaccctgcatctttagacaaggccatgtccattcccatgtgggtggacaatgttcagtgtccaaaaggacctgacaygctgtggcagtgcccatcatctccatgggagaagagactggccagcccctcggaggagacctggatcacatgtgacaacaagataagacttcaggaaggacccacttcctgttctggacgtgtggagatctggcatggaggttcctgggggacagtgtgtgatgactcttgggacttggacgatgctcaggtggtgtgtcaacaacttggctgtggtccagctttgaaagcattcaaagaagcagagtttggtcaggggactggacccgatatggctcaatgaagtgaagtgcaaagggaatgagtcttccttgtgggattgtcctgccagacgctggggccatagtgagtgtgggcacaaggaagacgctgcagtgaattgcacagatatttcagtgcagaaaaccccacaaaaagccacaacaggtcgctcatcccgtcagtcatcctttattgcagtcgggatccttggggttgttctgttggccattttcgtcgcattattcttcttgactaaaaagcgaagacagagacagcggcttgcagtttcctcaagaggagagaacttagtccaccaaattcaataccgggagatgaattcttgcctgaatgcagatgatctggacctaatgaattcctcagaaaattcccatgagtcagctgatttcagtgctgctgaactaatttctgtgtctaaatttmttcctatttctggaatggaaaaggaggccattctgagccacactgaaaaggaaaatgggaatttataacccagtgagttcagcctttaagataccttgatgaagacctggactattgaatggagcagaaattcacctctctcactgactattacagttgcatttttatggagttcttcttctcctaggattcctaagactgctgctgaatttataaaaattaagtttgtgaatgtgactacttagtggtgtatatgagactttcaagggaattaaataaataaataagaatgttattgatttgagtttgctttaattacttgtccttaattctattaatttctaaaygggcttcctaattttttgtagagtttcctagatgtattataatgtgttttatttgacagtgtttcaatttgcatatacagtactgtatattttttcttatttggtttgaataattttcctattaccaaataaaaataaatttwtttttactttagtttttctaagacaggaaaagttaatgatattgaagggtctgtaaataatatatggctaactttataaggcatgactcacaacgattctttaactgctttttgttactgtaattctgttcactagaataaaatgcagagccacacctggtgagggcac

SEQ ID NO: 66 - DNA, 4149 bp, Homo sapiens
gaattcttagttgttttctttagaagaacatttctagggaataatacaagaagatttaggaatcattgaagttataaatctttggaatgagcaaactcagaatggtgctrcttgaagactctggatctgctgacttcagaagacattttgtcaacytgagtcccttcaccattactgtggtcttacttctcagtgcctgttttgtcaccagttctcttggaggaacagacaaggagctgaggctagtggatggtgaaaacaagtgtagcgggagagtggaagtgaaagtccaggaggagtggggaacggtgtgtaataatggctggagcatggaagcggtctctgtgatttgtaaccagctgggatgtccaactgctatcaaagcccctggatgggctaattccagtgcaggttctggacgcatttggatggatcatgtttcttgtcgtgggaatgagtcagctctttgggattgcaaacatgatggatggggaaagcatagtaactgtactcaccaacaagatgctggagtgacctgctcagatggatccaatttggaaatgaggctgacgcgtggagggaatatgtgttctggaagaatagagatcaaattccaaggacggtggggaacagtgtgtgatgataacttcaacatagatcatgcatctgtcatttgtagacaacttgaatgtggaagtgctgtcagtttctctggttcatctaattttggagaaggctctggaccaatctggtttgatgatcttatatgcaacggaaatgagtcagctctctggaactgcaaacatcaaggatggggaaagcataactgtgatcatgctgaggatgctggagtgatttgctcaaagggagcagatctgagcctgagactggtagatggagtcactgaatgttcaggaagattagaagtgagattccaaggrgaatgggggacaatatgtgatgacggctgggacagttacgatgctgctgtggcatgcaagcaactgggatgtccaactgccgtcacagccattggtcgagttaacgccagtaagggatttggacacatctggcttgacagcgtttcttgccagggacatgaacctgctrtctggcaatgtaaacaccatgaatggggaaagcattattgcaatcacaatgaagatgctggcgtgacatgttctgatggatcagatctggagctaagacttagaggtggaggcagccgctgtgctgggacagttgaggtggagattcagagactgttagggaaggtgtgtgacagaggctggggactgaaagaagctgatgtggtttgcaggcagctgggatgtggatctgcactcaaaacatcttatcaagtgtactccaaaatccaggcaacaaacacatggctgtttctaagtagctgtaacggaaatgaaacttctctttgggactgcaagaactggcaatggggtggacttacctgtgatcactatgaagaagccaaaattacctgctcagcccacagggaacccagactggttggaggggacattccctgttctggacgtgttgaagtgaagcatggtgacacgtggggctccatctgtgattcrgacttctctctggaagctgccagcgttctatgcagggaattacagtgtggcacagttgtctctatcctggggggagctcactttggagagggaaatggacagatctgggctgaagaattccagtgtgagggacatgagtcccatctttcactctgcccagtagcacccygcccagaaggaacttgtagccacarcagggatgttggagtagtctgctcaagatacacagaaattcgcttggtgaatggcaagaccccgtgtgagggcagagtggagctcaaaacgcttggtgcctggggatccctctgtaactctcactgggacatagaagatgcccatgttctttgccagcagcttaaatgtggagttgccctttctaccccaggaggagcacgttttggaaaaggaaatggtcagatctggaggcatatgtttcactgcactgggactgagcagcacatgggagattgtcctgtaactgctctaggtgcttcattatgtccttcagagcaagtggcctctgtaatctgctcaggaaaccagtcccaaacactgtcctcgtgcaattcatcgtctttgggcccaacaaggcctaccattccagaagaaagtgctgtggcctgcatagagagtggtcaacttcgcctggtaaatggaggaggtcgctgtgctgggagagtagagatctatcatgagggctcctggggcaccatctgtgatgacagctgggacctgagtgatgcccacgtggtttgcagacagctgggctgtggagaggccattaatgccactggttctgctcattttggggaaggaacagggcccatctggctggatgagatgaaatgcaatggaaaagaatcccgcatttggcagtgccattcacacggctgggggcagcaaaattgcaggcacaaggaggatgcgggagttatctgctcagaattcatgtctctgagactgaccagtgaagccagcagagaggcctgtgcagggcgtctggaagttttttacaatggagcttggggcactgttggcaagagtagcatgtctgaaaccactgtgggtgtggtgtgcaggcagytgggctgtgcagacaaagggaaaatcaaccctgcatctttagacaaggccatgtccattcccatgtgggtggacaatgttcagtgtccaaaaggacctgacaygctgtggcagtgcccatcatctccatgggagaagagactggccagcccctcggaggagacctggatcacatgtgacaacaagataagacttcaggaaggacccacttcctgttctggacgtgtggagatctggcatggaggttcctgggggacagtgtgtgatgactcttgggacttggacgatgctcaggtggtgtgtcaacaacttggctgtggtccagctttgaaagcattcaaagaagcagagtttggtcaggggactggacccgatatggctcaatgaagtgaagtgcaaagggaatgagtcttccttgtgggattgtcctgccagacgctggggccatagtgagtgtgggcacaaggaagacgctgcagtgaattgcacagatatttcagtgcagaaaaccccacaaaaagccacaacaggtcgctcatcccgtcagtcatcctttattgcagtcgggatccttggggttgttctgttggccattttcgtcgcattattcttcttgactaaaaagcgaagacagagacagcggcttgcagtttcctcaagaggagagaacttagtccaccaaattcaataccgggagatgaattcttgcctgaatgcagatgatctggacctaatgaattcctcagaaaattcccatgagtcagctgatttcagtgctgctgaactaatttctgtgtctaaatttmttcctatttctggaatggaaaaggaggccattctgagccacactgaaaaggaaaatgggaatttataacccagtgagttcagcctttaagataccttgatgaagacctggactattgaatggagcagaaattcacctctctcactgactattacagttgcatttttatggagttcttcttctcctaggattcctaagactgctgctgaatttataaaaattaagtttgtgaatgtgactacttagtggtgtatatgagactttcaagggaattaaataaataaataagaatgttattgatttgagtttgctttaattacttgtccttaattctattaatttctaaaygggcttcctaattttttgtagagtttcctagatgtattataatgtgttttatttgacagtgtttcaatttgcatatacagtactgtatattttttcttatttggtttgaataattttcctattaccaaataaaaataaatttwtttttactttagtttttctaagacaggaaaagttaatgatattgaagggtctgtaaataatatatggctaactttataaggcatgactcacaacgattctttaactgctttttgttactgtaattctgttcactagaataaaatgcagagccacacctggtgagggcac

SEQ ID NO: 67 - DNA, 5313 bp, Homo sapiens
gaattcttagttgttttctttagaagaacatttctagggaataatacaagaagatttaggaatcattgaagttataaatctttggaatgagcaaactcagaatggtgctrcttgaagactctggatctgctgacttcagaagacattttgtcaacytgagtcccttcaccattactgtggtcttacttctcagtgcctgttttgtcaccagttctcttggaggaacagacaaggagctgaggctagtggatggtgaaaacaagtgtagcgggagagtggaagtgaaagtccaggaggagtggggaacggtgtgtaataatggctggagcatggaagcggtctctgtgatttgtaaccagctgggatgtccaactgctatcaaagcccctggatgggctaattccagtgcaggttctggacgcatttggatggatcatgtttcttgtcgtgggaatgagtcagctctttgggattgcaaacatgatggatggggaaagcatagtaactgtactcaccaacaagatgctggagtgacctgctcagatggatccaatttggaaatgaggctgacgcgtggagggaatatgtgttctggaagaatagagatcaaattccaaggacggtggggaacagtgtgtgatgataacttcaacatagatcatgcatctgtcatttgtagacaacttgaatgtggaagtgctgtcagtttctctggttcatctaattttggagaaggctctggaccaatctggtttgatgatcttatatgcaacggaaatgagtcagctctctggaactgcaaacatcaaggatggggaaagcataactgtgatcatgctgaggatgctggagtgatttgctcaaagggagcagatctgagcctgagactggtagatggagtcactgaatgttcaggaagattagaagtgagattccaaggrgaatgggggacaatatgtgatgacggctgggacagttacgatgctgctgtggcatgcaagcaactgggatgtccaactgccgtcacagccattggtcgagttaacgccagtaagggatttggacacatctggcttgacagcgtttcttgccagggacatgaacctgctrtctggcaatgtaaacaccatgaatggggaaagcattattgcaatcacaatgaagatgctggcgtgacatgttctgatggatcagatctggagctaagacttagaggtggaggcagccgctgtgctgggacagttgaggtggagattcagagactgttagggaaggtgtgtgacagaggctggggactgaaagaagctgatgtggtttgcaggcagctgggatgtggatctgcactcaaaacatcttatcaagtgtactccaaaatccaggcaacaaacacatggctgtttctaagtagctgtaacggaaatgaaacttctctttgggactgcaagaactggcaatggggtggacttacctgtgatcactatgaagaagccaaaattacctgctcagcccacagggaacccagactggttggaggggacattccctgttctggacgtgttgaagtgaagcatggtgacacgtggggctccatctgtgattcrgacttctctctggaagctgccagcgttctatgcagggaattacagtgtggcacagttgtctctatcctggggggagctcactttggagagggaaatggacagatctgggctgaagaattccagtgtgagggacatgagtcccatctttcactctgcccagtagcacccygcccagaaggaacttgtagccacarcagggatgttggagtagtctgctcaagatacacagaaattcgcttggtgaatggcaagaccccgtgtgagggcagagtggagctcaaaacgcttggtgcctggggatccctctgtaactctcactgggacatagaagatgcccatgttctttgccagcagcttaaatgtggagttgccctttctaccccaggaggagcacgttttggaaaaggaaatggtcagatctggaggcatatgtttcactgcactgggactgagcagcacatgggagattgtcctgtaactgctctaggtgcttcattatgtccttcagagcaagtggcctctgtaatctgctcaggaaaccagtcccaaacactgtcctcgtgcaattcatcgtctttgggcccaacaaggcctaccattccagaagaaagtgctgtggcctgcatagagagtggtcaacttcgcctggtaaatggaggaggtcgctgtgctgggagagtagagatctatcatgagggctcctggggcaccatctgtgatgacagctgggacctgagtgatgcccacgtggtttgcagacagctgggctgtggagaggccattaatgccactggttctgctcattttggggaaggaacagggcccatctggctggatgagatgaaatgcaatggaaaagaatcccgcatttggcagtgccattcacacggctgggggcagcaaaattgcaggcacaaggaggatgcgggagttatctgctcagaattcatgtctctgagactgaccagtgaagccagcagagaggcctgtgcagggcgtctggaagttttttacaatggagcttggggcactgttggcaagagtagcatgtctgaaaccactgtgggtgtggtgtgcaggcagytgggctgtgcagacaaagggaaaatcaaccctgcatctttagacaaggccatgtccattcccatgtgggtggacaatgttcagtgtccaaaaggacctgacaygctgtggcagtgcccatcatctccatgggagaagagactggccagcccctcggaggagacctggatcacatgtgacaacaagataagacttcaggaaggacccacttcctgttctggacgtgtggagatctggcatggaggttcctgggggacagtgtgtgatgactcttgggacttggacgatgctcaggtggtgtgtcaacaacttggctgtggtccagctttgaaagcattcaaagaagcagagtttggtcaggggactggacccgatatggctcaatgaagtgaagtgcaaagggaatgagtcttccttgtgggattgtcctgccagacgctggggccatagtgagtgtgggcacaaggaagacgctgcagtgaattgcacagatatttcagtgcagaaaaccccacaaaaagccacaacaggtcgctcatcccgtcagtcatcctttattgcagtcgggatccttggggttgttctgttggccattttcgtcgcattattcttcttgactaaaaagcgaagacagagacagcggcttgcagtttcctcaagaggagagaacttagtccaccaaattcaataccgggagatgaattcttgcctgaatgcagatgatctggacctaatgaattcctcaggtctgtgggttcttggagggtctattgcccaggggttcagatcagtggctgcagttgaggcacagacattctactttgataaacagttwaaaaagtctaaaaatgtaataggaagcttagatgcatataatggacaagaatgactgaaaattattcttggagaatatcaaaattgcaatcatagggaggcctttagcttaagaggcctgtgattattcctgatagaggtatggaaagaaccatgcagaggaatattatgacttggacctcattttattaaaacagaaattaatcttacaaaagattgtcataagtgacagtttaacttttttctttaaattttgttgtgtatatttaaggtatacaacatgattttatgggatgtatatagatagtaaaaagcttactaaagcaaagcaaatgaacacacccatcatctgacatagttacccttttttgtgttgttcttgtggcaagagcagctaaaacctactcacttagcatgaatcctacatacagcacaatgttattacctataatcctcatgttgtacattagacctctagactggttcattctacgtatctgctactttgtatcctctgacctacatacgtctttcacagtttcttccattcccatttcctgtcattttttttctctagcttgatatttattatatttttccctaaaagtctaaaaccttaaactttcaatatctttattgcatgagaagccatacaaatccacagaactagccttatttctcatcacatcatgctgttttatccttgaacttctatttagcaccagtgcactaattctgcatctgggcaggatgactttactgggttggaagaaatatcccaaaacccattgtctttactccatgaagggtccctgaccttctgagaggggcctgcctcacttcttccrtccaaagaattatgcatctgctactgtgtcagggaacatatttaaggaacatgtactgttactgtgtcaggaaacatatttaagaaataggaaagactttctctgccccttaaatcacacatgcttttcttcctagttatgggtggtgtttttagttgctcaaagagcctcacagttacgtgagaagaggtctggtttatttcccagtaattattttcttcctttcagaaaattcccatgagtcagctgatttcagtgctgctgaactaatttctgtgtctaaatttmttcctatttctggaatggaaaaggaggccattctgagccacactgaaaaggaaaatgggaatttataacccagtgagttcagcctttaagataccttgatgaagacctggactattgaatggagcagaaattcacctctctcactgactattacagttgcatttttatggagttcttcttctcctaggattcctaagactgctgctgaatttataaaaattaagtttgtgaatgtgactacttagtggtgtatatgagactttcaagggaattaaataaataaataagaatgttattgatttgagtttgctttaattacttgtccttaattctattaatttctaaaygggcttcctaattttttgtagagtttcctagatgtattataatgtgttttatttgacagtgtttcaatttgcatatacagtactgtatattttttcttatttggtttgaataattttcctattaccaaataaaaataaatttwtttttactttagtttttctaagacaggaaaagttaatgatattgaagggtctgtaaataatatatggctaactttataaggcatgactcacaacgattctttaactgctttttgttactgtaattctgttcactagaataaaatgcagagccacacctggtgagggcac

SEQ ID NO: 68 - DNA, 4950 bp, Homo sapiens
gaattcttagttgttttctttagaagaacatttctagggaataatacaagaagatttaggaatcattgaagttataaatctttggaatgagcaaactcagaatggtgctrcttgaagactctggatctgctgacttcagaagacattttgtcaacytgagtcccttcaccattactgtggtcttacttctcagtgcctgttttgtcaccagttctcttggaggaacagacaaggagctgaggctagtggatggtgaaaacaagtgtagcgggagagtggaagtgaaagtccaggaggagtggggaacggtgtgtaataatggctggagcatggaagcggtctctgtgatttgtaaccagctgggatgtccaactgctatcaaagcccctggatgggctaattccagtgcaggttctggacgcatttggatggatcatgtttcttgtcgtgggaatgagtcagctctttgggattgcaaacatgatggatggggaaagcatagtaactgtactcaccaacaagatgctggagtgacctgctcagatggatccaatttggaaatgaggctgacgcgtggagggaatatgtgttctggaagaatagagatcaaattccaaggacggtggggaacagtgtgtgatgataacttcaacatagatcatgcatctgtcatttgtagacaacttgaatgtggaagtgctgtcagtttctctggttcatctaattttggagaaggctctggaccaatctggtttgatgatcttatatgcaacggaaatgagtcagctctctggaactgcaaacatcaaggatggggaaagcataactgtgatcatgctgaggatgctggagtgatttgctcaaagggagcagatctgagcctgagactggtagatggagtcactgaatgttcaggaagattagaagtgagattccaaggrgaatgggggacaatatgtgatgacggctgggacagttacgatgctgctgtggcatgcaagcaactgggatgtccaactgccgtcacagccattggtcgagttaacgccagtaagggatttggacacatctggcttgacagcgtttcttgccagggacatgaacctgctrtctggcaatgtaaacaccatgaatggggaaagcattattgcaatcacaatgaagatgctggcgtgacatgttctgatggatcagatctggagctaagacttagaggtggaggcagccgctgtgctgggacagttgaggtggagattcagagactgttagggaaggtgtgtgacagaggctggggactgaaagaagctgatgtggtttgcaggcagctgggatgtggatctgcactcaaaacatcttatcaagtgtactccaaaatccaggcaacaaacacatggctgtttctaagtagctgtaacggaaatgaaacttctctttgggactgcaagaactggcaatggggtggacttacctgtgatcactatgaagaagccaaaattacctgctcagcccacagggaacccagactggttggaggggacattccctgttctggacgtgttgaagtgaagcatggtgacacgtggggctccatctgtgattcrgacttctctctggaagctgccagcgttctatgcagggaattacagtgtggcacagttgtctctatcctggggggagctcactttggagagggaaatggacagatctgggctgaagaattccagtgtgagggacatgagtcccatctttcactctgcccagtagcacccygcccagaaggaacttgtagccacarcagggatgttggagtagtctgctcaagatacacagaaattcgcttggtgaatggcaagaccccgtgtgagggcagagtggagctcaaaacgcttggtgcctggggatccctctgtaactctcactgggacatagaagatgcccatgttctttgccagcagcttaaatgtggagttgccctttctaccccaggaggagcacgttttggaaaaggaaatggtcagatctggaggcatatgtttcactgcactgggactgagcagcacatgggagattgtcctgtaactgctctaggtgcttcattatgtccttcagagcaagtggcctctgtaatctgctcaggaaaccagtcccaaacactgtcctcgtgcaattcatcgtctttgggcccaacaaggcctaccattccagaagaaagtgctgtggcctgcatagagagtggtcaacttcgcctggtaaatggaggaggtcgctgtgctgggagagtagagatctatcatgagggctcctggggcaccatctgtgatgacagctgggacctgagtgatgcccacgtggtttgcagacagctgggctgtggagaggccattaatgccactggttctgctcattttggggaaggaacagggcccatctggctggatgagatgaaatgcaatggaaaagaatcccgcatttggcagtgccattcacacggctgggggcagcaaaattgcaggcacaaggaggatgcgggagttatctgctcagaattcatgtctctgagactgaccagtgaagccagcagagaggcctgtgcagggcgtctggaagttttttacaatggagcttggggcactgttggcaagagtagcatgtctgaaaccactgtgggtgtggtgtgcaggcagytgggctgtgcagacaaagggaaaatcaaccctgcatctttagacaaggccatgtccattcccatgtgggtggacaatgttcagtgtccaaaaggacctgacaygctgtggcagtgcccatcatctccatgggagaagagactggccagcccctcggaggagacctggatcacatgtgacaacaagataagacttcaggaaggacccacttcctgttctggacgtgtggagatctggcatggaggttcctgggggacagtgtgtgatgactcttgggacttggacgatgctcaggtggtgtgtcaacaacttggctgtggtccagctttgaaagcattcaaagaagcagagtttggtcaggggactggaccgatatggctcaatgaagtgaagtgcaaagggaatgagtcttccttgtgggattgtcctgccagacgctggggccatagtgagtgtgggcacaaggaagacgctgcagtgaattgcacagatatttcagtgcagaaaaccccacaaaaagccacaacaggtcgctcatcccgtcagtcatcctttattgcagtcgggatccttggggttgttctgttggccattttcgtcgcattattcttcttgactaaaaagcgaagacagagacagcggcttgcagtttcctcaagaggagagaacttagtccaccaaattcaataccgggagatgaattcttgcctgaatgcagatgatctggacctaatgaattcctcaggtctgtgggttcttggagggtctattgcccaggggttcagatcagtggctgcagttgaggcacagacattctactttgataaacagttwaaaaagtctaaaaatgtaataggaagcttagatgcatataatggacaagaatgactgaaaattattcttggagaatatcaaaattgcaatcatagggaggcctttagcttaagaggcctgtgattattcctgatagaggtatggaaagaaccatgcagaggaatattatgacttggacctcattttattaaaacagaaattaatcttacaaaagattgtcataagtgacagtttaacttttttctttaaattttgttgtgtatatttaaggtatacaacatgattttatgggatgtatatagatagtaaaaagcttactaaagcaaagcaaatgaacacacccatcatctgacatagttacccttttttgtgttgttcttgtggcaagagcagctaaaacctactcacttagcatgaatcctacatacagcacaatgttattacctataatcctcatgttgtacattagacctctagactggttcattctacgtatctgctactttgtatcctctgacctacatacgtctttcacagtttcttccattcccatttcctgtcattttttttctctagcttgatatttattatatttttccctaaaagtctaaaaccttaaactttcaatatctttattgcatgagaagccatacaaatccacagaactagccttatttctcatcacatcatgctgttttatccttgaacttctatttagcaccagtgcactaattctgcatctgggcaggatgactttactgggttggaagaaatatcccaaaacccattgtctttactccatgaagggtccctgaccttctgagaggggcctgcctcacttcttccrtccaaagaattatgcatctgctactgtgtcagggaacatatttaaggaacatgtactgttactgtgtcaggaaacatatttaagaaataggaaagactttctctgccccttaaatcacacatgcttttcttcctagttatgggtggtgtttttagttgctcaaagagcctcacagttacgtgagaagaggtctggtttatttcccagtaattattttcttcctttcagaaaattcccatgagtcagctgatttcagtgctgctgaactaatttctgtgtctaaatttmttcctatttctggaatggaaaaggaggccattctgagccacactgaaaaggaaaatgggaatttataacccagtgagttcagcctttaagataccttgatgaagacctggactattgaatggagcagaaattcacctctctcactgactattacagttgcatttttatggagttcttcttctcctaggattcctaagactgctgctgaatttataaaaattaagtttgtgaatgtgactacttagtggtgtatatgagactttcaagggaattaaataaataaataagaatgttaaa

SEQ ID NO: 69 - DNA, 8226 bp, Homo sapiens
ggcggggcggggacagcccggcgggtctctcctcccccgcgccccgggcctccagaggggcgggaggggaccgtcccatataagccccggctcccggcgctcggacgcccgcgccggctgtgctgcacagggggaggagagggaaccccaggcgcgagcgggaagaggggacctgcagccacaacttctctggtcctctgcatcccttctgtccctccacccgtccccttccccaccctctggcccccaccttcttggaggcgacaacccccgggaggcattagaagggatttttcccgcaggttgcgaagggaagcaaacttggtggcaacttgcctcccggtgcgggcgtctctcccccaccgtctcaacatgcttaggggtccggggcccgggctgctgctgctggccgtccwgtgcctggggacagcggtgccctccacgggagcctcgaagagcaagaggcaggctcagcaaatggttcagccccagtccccggtggctgtcagtcaaagcaagcccggttgttatgacaatggaaaacactatcagataaatcaacagtgggagcggacctacctaggcaatgcgttggtttgtacttgttatggaggaagccgaggttttaactgcgagagtaaacctgaagctgaagagacttgctttgacaagtacactgggaacacttaccgagtgggtgacacttatgagcgtcctaaagactccatgatctgggactgtacctgcatyggggctgggcgagggagaataagctgtaccatcgcaaaccgctgccatgaagggggtcagtcctacaagattggtgacacctggaggagaccacatgagactggtggttacatgttagagtgtgtgtgtcttggtaatggaaaaggagaatggacctgcaagcccatagctgagaagtgttttgatcatgctgctgggacttcctatgtggtcggagaaacgtgggagaagccctaccaaggctggatgatggtagattgtacttgcctgggagaaggcagcggacgcatcacttgcacttctagaaatagatgcaacgatcaggacacaaggacatcctatagaattggagacacctggagcaagaaggataatcgaggaaacctgctccagtgcatctgcacaggcaacggccgaggagagtggaagtgtgagaggcacacctctgtgcagaccacatcgagcggatctggccccttcaccgatgttcgtgcagctgtttaccaaccgcagcctcacccccagcctcctccctatggccactgtgtcacagacagtggtgtggtctactctgtggggatgcagtggctgaagacacaaggaaataagcaaatgctttgcacgtgcctgggcaacggagtcagctgccaagagacagctgtaacccagacttacggtggcaactcaaatggagagccatgtgtcttaccattcacctacaatggcaggacgttctactcctgcaccacagaagggcgacaggacggacatctttggtgcagcacaacttcgaattatgagcaggaccagaaatactctttctgcacagaccacactgttttggttcagactcgaggaggaaattccaatggtgccttgtgccacttccccttcctatacaacaaccacaattacactgattgcacttctgagggcagaagagacaacatgaagtggtgtgggaccacacagaactatgatgccgaccagaagtttgggttctgccccatggctgcccacgaggaaatctgcacaaccaatgaaggggtcatgtaccgcattggagatcagtgggataagcagcatgacatgggtcacatgatgaggtgcacgtgtgttgggaatggtcgtggggaatggacatgcattgcctactcgcagcttcgagatcagtgcattgttgatgacatcacttacaatgtgaacgacacattccacaagcgtcatgaagaggggcacatgctgaactgtacatgcttcggtcagggtcggggcaggtggaagtgtgatcccgtcgaccaatgccaggattcagagactgggacgttttatcaaattggagattcatgggagaagtatgtgcatggtgtcagataccagtgctactgctatggccgtggcattggggagtggcattgccaacctttacagacctatccaagctcaagtggtcctgtcgaagtatttatcactgagactccgagtcagcccaactcccaccccatccagtggaatgcaccacagccatctcacatttccaagtacattctcaggtggagacctaaaaattctgtaggccgttggaaggaagctaccataccaggccacttaaactcctacaccatcaaaggcctgaagcctggtgtggtatacgagggccagctcatcagcatccagcagtacggccaccaagaagtgactcgctttgacttcaccaccaccagcaccagcacacctgtgaccagtatgtacacaaccaccctcatgcctcctacccccgaggttcctagagctaggctctcctgaggcaatgctttccttctcaattcatattcttccaggaggggcaccaacgttttttaaaatgatgttggcgacgaggacggtaaattttctagatgactgaaggctgactttcccctttctgtgactctctaggcaacaccgtgacaggagagacgactcccttttctcctcttgtggccacttctgaatctgtgaccgaaatcacagccagtagctttgtggtctcctgggtctcagcttccgacaccgtgtcgggattccgggtggaatatgagctgagtgaggagggagatgagccacagtacctggatcttccaagcacagccacttctgtgaacatccctgacctgcttcctggccgaaaatacattgtaaatgtctatcagatatctgaggatggggagcagagtttgatcctgtctacttcacaaacaacagcgcctgatgccccwcctgacmcgactgtggaccaagttgatgacacctcaattgttgttcgctggagcagaccccaggctcccatcacagggtacagaatagtctattcgccatcagtagaaggtagcagcacagaactcaaccttcctgaaactgcaaactccgtcaccctcagtgacttgcaacctggtgttcagtataacatcactatctatgctgtggaagaaaatcaagaaagtacacctgttgtcattcaacaagaaaccactggcaccccacgctcagatacagtgccctctcccagggacctgcagtttgtggaagtgacagacgtgaaggtcaccatcatgtggacaccgcctgagagtgcagtgaccggctaccgtgtggatgtgatccccgtcaacctgcctggcgagcacgggcagaggctgcccatcagcaggaacacctttgcagaagtcaccgggctgtcccctggggtcacctattacttcaaagtctttgcagtgagccatgggagggagagcaagcctctgactgctcaacagacaaccaaactggatgctcccactaacctccagtttgtcaatgaaactgattctactgtcctggtgagatggactccacctcgggcccagataacaggataccgactgaccgtgggccttacccgaagaggmcagcccaggcagtacaatrtgggtccctctgtctccaagtacccmctgaggaatctgcagcctgcatctgagtacaccgtatccctcgtggccataaagggcaaccaagagagccccaaagccactggagtctttaccacactgcagcctgggagctctattccaccttacaacaccgaggtgactgagaccaccattgtgatcacatggacgcctgctccaagaattggttttaagctgggtgtacgaccaagccagggaggagaggcaccacgagaagtgacttcagactcaggaagcatcgttgtgtccggcttgactccaggagtagaatacgtctacaccatccaagtcctgagagatggacaggaaagagatgcgccaattgtaaacaaagtggtgacaccattgtctccaccaacaaacttgcatctggaggcaaaccctgacactggagtgctcacagtctcctgggagaggagcaccaccccagacattactggttatagaattaccacaacccctacaaacggccagcagggaaattctttggaagaagtggtccatgctgatcagagctcctgcacttttgataacctgagtcccggcctggagtacaatgtcagtgtttacactgtcaaggatgacaaggaaagtgtccctatctctgataccatcatcccagctgttcctcctcccactgacctgcgattcaccaacattggtccagacaccatgcgtgtcacctgggctccacccccatccattgatttaaccaacttcctggtgcgttactcacctgtgaaaaatgaggaagatgttgcagagttgtcaatttctccttcagacaatgcagtggtcttaacaaatctcctgcctggtacagaatatgtagtgagtgtctccagtgtctacgaacaacatgagagcacacctcttagaggaagacagaaaacaggtcttgattccccaactggcattgacttttctgatattactgccaactcttttactgtgcactggattgctcctcgagccaccatcactggctacaggatccgccatcatcccgagcacttcagtgggagacctcgagaagatcgggtgccccactctcggaattccatcaccctcaccaacctcactccaggcacagagtatgtggtcagcatcgttgctcttaatggcagagaggaaagtcccttattgattggccaacaatcaacagtttctgatgttccgagggacctggaagttgttgctgcgacccccaccagcctactgatcagctgggatgctcctgctgtcacagtgagatattacaggatcacttacggagaracaggaggaaatagccctgtccaggagttcactgtgcctgggagcaagtctacagctaccatcagcggccttaaacctggagttgattataccatcactgtgtatgctgtcactggccgtggagacagccccgcaagcagcaagccaatttccattaattaccgaacagaaattgacaaaccatcccagatgcaagtgaccgatgttcaggacaacagcattagtgtcaagtggctgccttcaagttcccctgttactggttacagagtaaccaccactcccaaaaatggaccaggaccaacaaaaactaaaactgcaggtccagatcaaacagaaatgactattgaaggcttgcagcccacagtggagtatgtggttagtgtctatgatggaatccatgagctattccctgcacctgatggtgaagaagacactgcagagctgcaaggcctcagaccgggttctgagtacacagtcagtgtggttgccttgcacgatgatatggagagccagcccctgattggaacccagtccacagctattcctgcaccaactgacctgaagttcactcaggtcacacccacaagcctgagcgcccagtggacaccacccaatgttcagctcactggatatcgagtgcgggtgacccccaaggagaagaccggaccaatgaaagaaatcaaccttgctcctgacagctcatccgtggttgtatcaggacttatggtggccaccaaatatgaagtgagtgtctatgctcttaaggacactttgacaagcagaccagctcagggwgttgtcaccactctggagaatgtcagcccaccaagaagggctcgtgtgacagatgctactgagaccaccatcaccattagctggagaaccaagactgagacgatcactggcttccaagttgatgccgttccagccaatggccagactccaatccagagaaccatcaagccagatgtcagaagctacaccatcacaggtttacaaccaggcactgactacaagatctacctgtacaccttgaatgacaatgctcggagctcccctgtggtcatcgacgcctccactgccattgatgcaccatccaacctgcgtttcctggccaccacacccaattccttgctggtatcatggcagccgccacgtgccaggattaccggctacatcatcaagtatgagaagcctgggtctcctcccagagaagtggtccctcggccccgccctggtgtcacagaggctactattactggcctggaaccgggaaccgaatatacaatttatgtcattgccctgaagaataatcagaagagcgagcccctgattggaaggaaaaagacagttcaaaagacccctttcgtcacccaccctgggtatgacactggaaatggtattcagcttcctggcacttctggtcagcaacccagtgttgggcaacaaatgatctttgaggaacatggttttaggcggaccacaccgcccacaacggccacccccataaggcataggccaagaccatacccgccgaatgtaggacaagaagctctctctcagacaaccrtctcatgggccccattccaggacacttctgagtacatcatttcatgtcatcctgttggcactgatgaagaacccttacagttcagggttcctggaacttctaccagtgccactctgacaggcctcaccagaggtgccacctacaacrtcatagtggaggcactgaaagaccagcagaggcataaggttcrggaagaggttgttaccgtgggcaactctgtcaacgaaggcttgaaccaacctacggatgactcgtgctttgacccctacacagtttcccattatgccgttggagatgagtgggaacgaatgtctgaatcaggctttaaactgttgtgccagtgcttaggctttggaagtggtcatttcagatgtgattcatctagatggtgccatgacaatggtgtgaactacaagattggagagaagtgggaccgtcagggagaaaatggccagatgatgagctgcacatgtcttgggaacggaaaaggagaattcaagtgtgaccctcatgaggcaacgtgttaygatgatgggaagacataccacgtaggagaacagtggcagaaggaatatctcggtgccatttgctcctgcacatgctttggaggccagcggggctggcgctgtgacaactgccgcagacctgggggtgaacccagtcccgaaggcactactggccagtcctacaaccagtattctcagagataccatcagagaacaaacactaatgttaattgcccaattgagtgcttcatgcctttagatgtacaggctgacagagaagattcccgagagtaaatcatctttccaatccagaggaacaagcatgtctctctgccaagatccatctaaactggagtgatgttagcagacccagcttagagttcttctttctttcttaagccctttgctctggaggaagttctcyagcttcagctcaactcacagcttctccaagcatcaccctgggagtttcctgagggttttctcataaatgagggctgcacattgcctgttctgcttcgaagtattcaataccgctcagtattttaaatgaagtgattctaagatttggtttgggatcaataggaaagcatatgcagccaaccaagatgcaaatgttttgaaatgattgtctggcccgcaatactgtaggaacaagcatgatcttgttactgtgatattttaaatatccacagtactcactttttccaaatgatcctagtaattgcctagaaatatctttctcttacctgttatttatcaatttttcccagtatttttatacggaaaaarttgtattgaaaacacttagtatgcagttgataagaggaatttggtataattatggtgggtgattattttttatactgtatgtgccaaagctttactactgtggaaagacaactgttttaataaaagatttacattccacaacttgaagttcatctatttgatataagacaccttcgggggaaataattcctgtgaatattctttttcaattcagcaaacatttgaaaatctatgatgtgcaagtctaattgttgatttcagtacaagattttctaaatcagttgctacaaaaactgattggtttttgtcacttcatctcttcactaatggagatagcttt

SEQ ID NO: 70 - DNA, 2443 bp, Homo sapiens
ggcggggcggggacagcccggcgggtctctcctcccccgcgccccgggcctccagaggggcgggaggggaccgtcccatataagccccggctcccggcgctcggacgcccgcgccggctgtgctgcacagggggaggagagggaaccccaggcgcgagcgggaagaggggacctgcagccacaacttctctggtcctctgcatcccttctgtccctccacccgtccccttccccaccctctggcccccaccttcttggaggcgacaacccccgggaggcattagaagggatttttcccgcaggttgcgaagggaagcaaacttggtggcaacttgcctcccggtgcgggcgtctctcccccaccgtctcaacatgcttaggggtccggggcccgggctgctgctgctggccgtccwgtgcctggggacagcggtgccctccacgggagcctcgaagagcaagaggcaggctcagcaaatggttcagccccagtccccggtggctgtcagtcaaagcaagcccggttgttatgacaatggaaaacactatcagataaatcaacagtgggagcggacctacctaggcaatgcgttggtttgtacttgttatggaggaagccgaggttttaactgcgagagtaaacctgaagctgaagagacttgctttgacaagtacactgggaacacttaccgagtgggtgacacttatgagcgtcctaaagactccatgatctgggactgtacctgcatyggggctgggcgagggagaataagctgtaccatcgcaaaccgctgccatgaagggggtcagtcctacaagattggtgacacctggaggagaccacatgagactggtggttacatgttagagtgtgtgtgtcttggtaatggaaaaggagaatggacctgcaagcccatagctgagaagtgttttgatcatgctgctgggacttcctatgtggtcggagaaacgtgggagaagccctaccaaggctggatgatggtagattgtacttgcctgggagaaggcagcggacgcatcacttgcacttctagaaatagatgcaacgatcaggacacaaggacatcctatagaattggagacacctggagcaagaaggataatcgaggaaacctgctccagtgcatctgcacaggcaacggccgaggagagtggaagtgtgagaggcacacctctgtgcagaccacatcgagcggatctggccccttcaccgatgttcgtgcagctgtttaccaaccgcagcctcacccccagcctcctccctatggccactgtgtcacagacagtggtgtggtctactctgtggggatgcagtggctgaagacacaaggaaataagcaaatgctttgcacgtgcctgggcaacggagtcagctgccaagagacagctgtaacccagacttacggtggcaactcaaatggagagccatgtgtcttaccattcacctacaatggcaggacgtgcagcacaacttcgaattatgagcaggaccagaaatactctttctgcacagaccacactgttttggttcagactcgaggaggaaattccaatggtgccttgtgccacttccccttcctatacaacaaccacaattacactgattgcacttctgagggcagaagagacaacatgaagtggtgtgggaccacacagaactatgatgccgaccagaagtttgggttctgccccatggctgcccacgaggaaatctgcacaaccaatgaaggggtcatgtaccgcattggagatcagtgggataagcagcatgacatgggtcacatgatgaggtgcacgtgtgttgggaatggtcgtggggaatggacatgcattgcctactcgcagcttcgagatcagtgcattgttgatgacatcacttacaatgtgaacgacacattccacaagcgtcatgaagaggggcacatgctgaactgtacatgcttcggtcagggtcggggcaggtggaagtgtgatcccgtcgaccaatgccaggattcagagactgggacgttttatcaaattggagattcatgggagaagtatgtgcatggtgtcagataccagtgctactgctatggccgtggcattggggagtggcattgccaacctttacagacctatccaagctcaagtggtcctgtcgaagtatttatcactgagactccgagtcagcccaactcccaccccatccagtggaatgcaccacagccatctcacatttccaagtacattctcaggtggagacctgtgagtatcccacccagaaaccttggatactgagtctcctaatcttatcaattctgatggtttctttttttcccagcttttgagccaacaactctgattaactattcctatagcatttactatatttgtttagtgaacaaacaatatgtggtcaattaaattgacttgtagactg

SEQ ID NO: 71 - DNA, 8013 bp, Homo sapiens
ggcggggcggggacagcccggcgggtctctcctcccccgcgccccgggcctccagaggggcgggaggggaccgtcccatataagccccggctcccggcgctcggacgcccgcgccggctgtgctgcacagggggaggagagggaaccccaggcgcgagcgggaagaggggacctgcagccacaacttctctggtcctctgcatcccttctgtccctccacccgtccccttccccaccctctggcccccaccttcttggaggcgacaacccccgggaggcattagaagggatttttcccgcaggttgcgaagggaagcaaacttggtggcaacttgcctcccggtgcgggcgtctctcccccaccgtctcaacatgcttaggggtccggggcccgggctgctgctgctggccgtccwgtgcctggggacagcggtgccctccacgggagcctcgaagagcaagaggcaggctcagcaaatggttcagccccagtccccggtggctgtcagtcaaagcaagcccggttgttatgacaatggaaaacactatcagataaatcaacagtgggagcggacctacctaggcaatgcgttggtttgtacttgttatggaggaagccgaggttttaactgcgagagtaaacctgaagctgaagagacttgctttgacaagtacactgggaacacttaccgagtgggtgacacttatgagcgtcctaaagactccatgatctgggactgtacctgcatyggggctgggcgagggagaataagctgtaccatcgcaaaccgctgccatgaagggggtcagtcctacaagattggtgacacctggaggagaccacatgagactggtggttacatgttagagtgtgtgtgtcttggtaatggaaaaggagaatggacctgcaagcccatagctgagaagtgttttgatcatgctgctgggacttcctatgtggtcggagaaacgtgggagaagccctaccaaggctggatgatggtagattgtacttgcctgggagaaggcagcggacgcatcacttgcacttctagaaatagatgcaacgatcaggacacaaggacatcctatagaattggagacacctggagcaagaaggataatcgaggaaacctgctccagtgcatctgcacaggcaacggccgaggagagtggaagtgtgagaggcacacctctgtgcagaccacatcgagcggatctggccccttcaccgatgttcgtgcagctgtttaccaaccgcagcctcacccccagcctcctccctatggccactgtgtcacagacagtggtgtggtctactctgtggggatgcagtggctgaagacacaaggaaataagcaaatgctttgcacgtgcctgggcaacggagtcagctgccaagagacagctgtaacccagacttacggtggcaactcaaatggagagccatgtgtcttaccattcacctacaatggcaggacgttctactcctgcaccacagaagggcgacaggacggacatctttggtgcagcacaacttcgaattatgagcaggaccagaaatactctttctgcacagaccacactgttttggttcagactcgaggaggaaattccaatggtgccttgtgccacttccccttcctatacaacaaccacaattacactgattgcacttctgagggcagaagagacaacatgaagtggtgtgggaccacacagaactatgatgccgaccagaagtttgggttctgccccatggctgcccacgaggaaatctgcacaaccaatgaaggggtcatgtaccgcattggagatcagtgggataagcagcatgacatgggtcacatgatgaggtgcacgtgtgttgggaatggtcgtggggaatggacatgcattgcctactcgcagcttcgagatcagtgcattgttgatgacatcacttacaatgtgaacgacacattccacaagcgtcatgaagaggggcacatgctgaactgtacatgcttcggtcagggtcggggcaggtggaagtgtgatcccgtcgaccaatgccaggattcagagactgggacgttttatcaaattggagattcatgggagaagtatgtgcatggtgtcagataccagtgctactgctatggccgtggcattggggagtggcattgccaacctttacagacctatccaagctcaagtggtcctgtcgaagtatttatcactgagactccgagtcagcccaactcccaccccatccagtggaatgcaccacagccatctcacatttccaagtacattctcaggtggagacctaaaaattctgtaggccgttggaaggaagctaccataccaggccacttaaactcctacaccatcaaaggcctgaagcctggtgtggtatacgagggccagctcatcagcatccagcagtacggccaccaagaagtgactcgctttgacttcaccaccaccagcaccagcacacctgtgaccagcaacaccgtgacaggagagacgactcccttttctcctcttgtggccacttctgaatctgtgaccgaaatcacagccagtagctttgtggtctcctgggtctcagcttccgacaccgtgtcgggattccgggtggaatatgagctgagtgaggagggagatgagccacagtacctggatcttccaagcacagccacttctgtgaacatccctgacctgcttcctggccgaaaatacattgtaaatgtctatcagatatctgaggatggggagcagagtttgatcctgtctacttcacaaacaacagcgcctgatgccccwcctgacmcgactgtggaccaagttgatgacacctcaattgttgttcgctggagcagaccccaggctcccatcacaggtcagctaaaatagtctattcgccatcagtagaaggtagcagcacagaactcaaccttcctgaaactgcaaactccgtcaccctcagtgacttgcaacctggtgttcagtataacatcactatctatgctgtggaagaaaatcaagaaagtacacctgttgtcattcaacaagaaaccactggcaccccacgctcagatacagtgccctctcccagggacctgcagtttgtggaagtgacagacgtgaaggtcaccatcatgtggacaccgcctgagagtgcagtgaccggctaccgtgtggatgtgatccccgtcaacctgcctggcgagcacgggcagaggctgcccatcagcaggaacacctttgcagaagtcaccgggctgtcccctggggtcacctattacttcaaagtctttgcagtgagccatgggagggagagcaagcctctgactgctcaacagacaaccaaactggatgctcccactaacctccagtttgtcaatgaaactgattctactgtcctggtgagatggactccacctcgggcccagataacaggataccgactgaccgtgggccttacccgaagaggmcagcccaggcagtacaatrtgggtccctctgtctccaagtacccmctgaggaatctgcagcctgcatctgagtacaccgtatccctcgtggccataaagggcaaccaagagagccccaaagccactggagtctttaccacactgcagcctgggagctctattccaccttacaacaccgaggtgactgagaccaccattgtgatcacatggacgcctgctccaagaattggttttaagctgggtgtacgaccaagccagggaggagaggcaccacgagaagtgacttcagactcaggaagcatcgttgtgtccggcttgactccaggagtagaatacgtctacaccatccaagtcctgagagatggacaggaaagagatgcgccaattgtaaacaaagtggtgacaccattgtctccaccaacaaacttgcatctggaggcaaaccctgacactggagtgctcacagtctcctgggagaggagcaccaccccagacattactggttatagaattaccacaacccctacaaacggccagcagggaaattctttggaagaagtggtccatgctgatcagagctcctgcacttttgataacctgagtcccggcctggagtacaatgtcagtgtttacactgtcaaggatgacaaggaaagtgtccctatctctgataccatcatcccagctgttcctcctcccactgacctgcgattcaccaacattggtccagacaccatgcgtgtcacctgggctccacccccatccattgatttaaccaacttcctggtgcgttactcacctgtgaaaaatgaggaagatgttgcagagttgtcaatttctccttcagacaatgcagtggtcttaacaaatctcctgcctggtacagaatatgtagtgagtgtctccagtgtctacgaacaacatgagagcacacctcttagaggaagacagaaaacaggtcttgattccccaactggcattgacttttctgatattactgccaactcttttactgtgcactggattgctcctcgagccaccatcactggctacaggatccgccatcatcccgagcacttcagtgggagacctcgagaagatcgggtgccccactctcggaattccatcaccctcaccaacctcactccaggcacagagtatgtggtcagcatcgttgctcttaatggcagagaggaaagtcccttattgattggccaacaatcaacagtttctgatgttccgagggacctggaagttgttgctgcgacccccaccagcctactgatcagctgggatgctcctgctgtcacagtgagatattacaggatcacttacggagaracaggaggaaatagccctgtccaggagttcactgtgcctgggagcaagtctacagctaccatcagcggccttaaacctggagttgattataccatcactgtgtatgctgtcactggccgtggagacagccccgcaagcagcaagccaatttccattaattaccgaacagaaattgacaaaccatcccagatgcaagtgaccgatgttcaggacaacagcattagtgtcaagtggctgccttcaagttcccctgttactggttacagagtaaccaccactcccaaaaatggaccaggaccaacaaaaactaaaactgcaggtccagatcaaacagaaatgactattgaaggcttgcagcccacagtggagtatgtggttagtgtctatgctcagaatccaagcggagagagtcagcctctggttcagactgcagtaaccaacattgatcgccctaaaggactggcattcactgatgtggatgtcgattccatcaaaattgcttgggaaagcccacaggggcaagtttccaggtacagggtgacctactckagccctgaggatggaatccatgagctattccctgcacctgatggtgaagaagacactgcagagctgcaaggcctcagaccgggttctgagtacacagtcagtgtggttgccttgcacgatgatatggagagccagcccctgattggaacccagtccacagctattcctgcaccaactgacctgaagttcactcaggtcacacccacaagcctgagcgcccagtggacaccacccaatgttcagctcactggatatcgagtgcgggtgacccccaaggagaagaccggaccaatgaaagaaatcaaccttgctcctgacagctcatccgtggttgtatcaggacttatggtggccaccaaatatgaagtgagtgtctatgctcttaaggacactttgacaagcagaccagctcagggwgttgtcaccactctggagaatgtcagcccaccaagaagggctcgtgtgacagatgctactgagaccaccatcaccattagctggagaaccaagactgagacgatcactggcttccaagttgatgccgttccagccaatggccagactccaatccagagaaccatcaagccagatgtcagaagctacaccatcacaggtttacaaccaggcactgactacaagatctacctgtacaccttgaatgacaatgctcggagctcccctgtggtcatcgacgcctccactgccattgatgcaccatccaacctgcgtttcctggccaccacacccaattccttgctggtatcatggcagccgccacgtgccaggattaccggctacatcatcaagtatgagaagcctgggtctcctcccagagaagtggtccctcggccccgccctggtgtcacagaggctactattactggcctggaaccgggaaccgaatatacaatttatgtcattgccctgaagaataatcagaagagcgagcccctgattggaaggaaaaagacaggacaagaagctctctctcagacaaccrtctcatgggccccattccaggacacttctgagtacatcatttcatgtcatcctgttggcactgatgaagaacccttacagttcagggttcctggaacttctaccagtgccactctgacaggcctcaccagaggtgccacctacaacrtcatagtggaggcactgaaagaccagcagaggcataaggttcrggaagaggttgttaccgtgggcaactctgtcaacgaaggcttgaaccaacctacggatgactcgtgctttgacccctacacagtttcccattatgccgttggagatgagtgggaacgaatgtctgaatcaggctttaaactgttgtgccagtgcttaggctttggaagtggtcatttcagatgtgattcatctagatggtgccatgacaatggtgtgaactacaagattggagagaagtgggaccgtcagggagaaaatggccagatgatgagctgcacatgtcttgggaacggaaaaggagaattcaagtgtgaccctcatgaggcaacgtgttaygatgatgggaagacataccacgtaggagaacagtggcagaaggaatatctcggtgccatttgctcctgcacatgctttggaggccagcggggctggcgctgtgacaactgccgcagacctgggggtgaacccagtcccgaaggcactactggccagtcctacaaccagtattctcagagataccatcagagaacaaacactaatgttaattgcccaattgagtgcttcatgcctttagatgtacaggctgacagagaagattcccgagagtaaatcatctttccaatccagaggaacaagcatgtctctctgccaagatccatctaaactggagtgatgttagcagacccagcttagagttcttctttctttcttaagccctttgctctggaggaagttctcyagcttcagctcaactcacagcttctccaagcatcaccctgggagtttcctgagggttttctcataaatgagggctgcacattgcctgttctgcttcgaagtattcaataccgctcagtattttaaatgaagtgattctaagatttggtttgggatcaataggaaagcatatgcagccaaccaagatgcaaatgttttgaaatgattgtctggcccgcaatactgtaggaacaagcatgatcttgttactgtgatattttaaatatccacagtactcactttttccaaatgatcctagtaattgcctagaaatatctttctcttacctgttatttatcaatttttcccagtatttttatacggaaaaarttgtattgaaaacacttagtatgcagttgataagaggaatttggtataattatggtgggtgattattttttatactgtatgtgccaaagctttactactgtggaaagacaactgttttaataaaagatttacattccacaacttgaagttcatctatttgatataagacaccttcgggggaaataattcctgtgaatattctttttcaattcagcaaacatttgaaaatctatgatgtgcaagtctaattgttgatttcagtacaagattttctaaatcagttgctacaaaaactgattggtttttgtcacttcatctcttcactaatggagatagcttt

SEQ ID NO: 72 - DNA, 6510 bp, Homo sapiens
ggcggggcggggacagcccggcgggtctctcctcccccgcgccccgggcctccagaggggcgggaggggaccgtcccatataagccccggctcccggcgctcggacgcccgcgccggctgtgctgcacagggggaggagagggaaccccaggcgcgagcgggaagaggggacctgcagccacaacttctctggtcctctgcatcccttctgtccctccacccgtccccttccccaccctctggcccccaccttcttggaggcgacaacccccgggaggcattagaagggatttttcccgcaggttgcgaagggaagcaaacttggtggcaacttgcctcccggtgcgggcgtctctcccccaccgtctcaacatgcttaggggtccggggcccgggctgctgctgctggccgtccwgtgcctggggacagcggtgccctccacgggagcctcgaagagcaagaggcaggctcagcaaatggttcagccccagtccccggtggctgtcagtcaaagcaagcccggttgttatgacaatggaaaacactatcagataaatcaacagtgggagcggacctacctaggcaatgcgttggtttgtacttgttatggaggaagccgaggttttaactgcgagagtaaacctgaagctgaagagacttgctttgacaagtacactgggaacacttaccgagtgggtgacacttatgagcgtcctaaagactccatgatctgggactgtacctgcatyggggctgggcgagggagaataagctgtaccatcgcaaaccgctgccatgaagggggtcagtcctacaagattggtgacacctggaggagaccacatgagactggtggttacatgttagagtgtgtgtgtcttggtaatggaaaaggagaatggacctgcaagcccatagctgagaagtgttttgatcatgctgctgggacttcctatgtggtcggagaaacgtgggagaagccctaccaaggctggatgatggtagattgtacttgcctgggagaaggcagcggacgcatcacttgcacttctagaaatagatgcaacgatcaggacacaaggacatcctatagaattggagacacctggagcaagaaggataatcgaggaaacctgctccagtgcatctgcacaggcaacggccgaggagagtggaagtgtgagaggcacacctctgtgcagaccacatcgagcggatctggccccttcaccgatgttcgtgcagctgtttaccaaccgcagcctcacccccagcctcctccctatggccactgtgtcacagacagtggtgtggtctactctgtggggatgcagtggctgaagacacaaggaaataagcaaatgctttgcacgtgcctgggcaacggagtcagctgccaagagacagctgtaacccagacttacggtggcaactcaaatggagagccatgtgtcttaccattcacctacaatggcaggacgttctactcctgcaccacagaagggcgacaggacggacatctttggtgcagcacaacttcgaattatgagcaggaccagaaatactctttctgcacagaccacactgttttggttcagactcgaggaggaaattccaatggtgccttgtgccacttccccttcctatacaacaaccacaattacactgattgcacttctgagggcagaagagacaacatgaagtggtgtgggaccacacagaactatgatgccgaccagaagtttgggttctgccccatggctgcccacgaggaaatctgcacaaccaatgaaggggtcatgtaccgcattggagatcagtgggataagcagcatgacatgggtcacatgatgaggtgcacgtgtgttgggaatggtcgtggggaatggacatgcattgcctactcgcagcttcgagatcagtgcattgttgatgacatcacttacaatgtgaacgacacattccacaagcgtcatgaagaggggcacatgctgaactgtacatgcttcggtcagggtcggggcaggtggaagtgtgatcccgtcgaccaatgccaggattcagagactgggacgttttatcaaattggagattcatgggagaagtatgtgcatggtgtcagataccagtgctactgctatggccgtggcattggggagtggcattgccaacctttacagacctatccaagctcaagtggtcctgtcgaagtatttatcactgagactccgagtcagcccaactcccaccccatccagtggaatgcaccacagccatctcacatttccaagtacattctcaggtggagacctaaaaattctgtaggccgttggaaggaagctaccataccaggccacttaaactcctacaccatcaaaggcctgaagcctggtgtggtatacgagggccagctcatcagcatccagcagtacggccaccaagaagtgactcgctttgacttcaccaccaccagcaccagcacacctgtgaccagcaacaccgtgacaggagagacgactcccttttctcctcttgtggccacttctgaatctgtgaccgaaatcacagccagtagctttgtggtctcctgggtctcagcttccgacaccgtgtcgggattccgggtggaatatgagctgagtgaggagggagatgagccacagtacctggatcttccaagcacagccacttctgtgaacatccctgacctgcttcctggccgaaaatacattgtaaatgtctatcagatatctgaggatggggagcagagtttgatcctgtctacttcacaaacaacagcgcctgatgccccwcctgacmcgactgtggaccaagttgatgacacctcaattgttgttcgctggagcagaccccaggctcccatcacagggtacagaatagtctattcgccatcagtagaaggtagcagcacagaactcaaccttcctgaaactgcaaactccgtcaccctcagtgacttgcaacctggtgttcagtataacatcactatctatgctgtggaagaaaatcaagaaagtacacctgttgtcattcaacaagaaaccactggcaccccacgctcagatacagtgccctctcccagggacctgcagtttgtggaagtgacagacgtgaaggtcaccatcatgtggacaccgcctgagagtgcagtgaccggctaccgtgtggatgtgatccccgtcaacctgcctggcgagcacgggcagaggctgcccatcagcaggaacactctttgcagtgagccatgggagggagagcaagcctctgactgctcaacagacaaccaaactggatgctcccactaacctccagtttgtcaatgaaactgattctactgtcctggtgagatggactccacctcgggcccagataacaggataccgactgaccgtgggccttacccgaagaggmcagcccaggcagtacaatrtgggtccctctgtctccaagtacccmctgaggaatctgcagcctgcatctgagtacaccgtatccctcgtggccataaagggcaaccaagagagccccaaagccactggagtctttaccacactgcagcctgggagctctattccaccttacaacaccgaggtgactgagaccaccattgtgatcacatggacgcctgctccaagaattggttttaagctgggtgtacgaccaagccagggaggagaggcaccacgagaagtgacttcagactcaggaagcatcgttgtgtccggcttgactccaggagtagaatacgtctacaccatccaagtcctgagagatggacaggaaagagatgcgccaattgtaaacaaagtggtgacaccattgtctccaccaacaaacttgcatctggaggcaaaccctgacactggagtgctcacagtctcctgggagaggagcaccaccccagacattactggttatagaattaccacaacccctacaaacggccagcagggaaattctttggaagaagtggtccatgctgatcagagctcctgcacttttgataacctgagtcccggcctggagtacaatgtcagtgtttacactgtcaaggatgacaaggaaagtgtccctatctctgataccatcatcccagctgttcctcctcccactgacctgcgattcaccaacattggtccagacaccatgcgtgtcacctgggctccacccccatccattgatttaaccaacttcctggtgcgttactcacctgtgaaaaatgaggaagatgttgcagagttgtcaatttctccttcagacaatgcagtggtcttaacaaatctcctgcctggtacagaatatgtagtgagtgtctccagtgtctacgaacaacatgagagcacacctcttagaggaagacagaaaacaggtcttgattccccaactggcattgacttttctgatattactgccaactcttttactgtgcactggattgctcctcgagccaccatcactggctacaggatccgccatcatcccgagcacttcagtgggagacctcgagaagatcgggtgccccactctcggaattccatcaccctcaccaacctcactccaggcacagagtatgtggtcagcatcgttgctcttaatggcagagaggaaagtcccttattgattggccaacaatcaacagtttctgatgttccgagggacctggaagttgttgctgcgacccccaccagcctactgatcagctgggatgctcctgctgtcacagtgagatattacaggatcacttacggagaracaggaggaaatagccctgtccaggagttcactgtgcctgggagcaagtctacagctaccatcagcggccttaaacctggagttgattataccatcactgtgtatgctgtcactggccgtggagacagccccgcaagcagcaagccaatttccattaattaccgaacagaaattgacaaaccatcccagatgcaagtgaccgatgttcaggacaacagcattagtgtcaagtggctgccttcaagttcccctgttactggttacagagtaaccaccactcccaaaaatggaccaggaccaacaaaaactaaaactgcaggtccagatcaaacagaaatgactattgaaggcttgcagcccacagtggagtatgtggttagtgtctatgctcagaatccaagcggagagagtcagcctctggttcagactgcagtaaccaacattgatcgccctaaaggactggcattcactgatgtggatgtcgattccatcaaaattgcttgggaaagcccacaggggcaagtttccaggtacagggtgacctactckagccctgaggatggaatccatgagctattccctgcacctgatggtgaagaagacactgcagagctgcaaggcctcagaccgggttctgagtacacagtcagtgtggttgccttgcacgatgatatggagagccagcccctgattggaacccagtccacagctattcctgcaccaactgacctgaagttcactcaggtcacacccacaagcctgagcgcccagtggacaccacccaatgttcagctcactggatatcgagtgcgggtgacccccaaggagaagaccggaccaatgaaagaaatcaaccttgctcctgacagctcatccgtggttgtatcaggacttatggtggccaccaaatatgaagtgagtgtctatgctcttaaggacactttgacaagcagaccagctcagggwgttgtcaccactctggagaatgtcagcccaccaagaagggctcgtgtgacagatgctactgagaccaccatcaccattagctggagaaccaagactgagacgatcactggcttccaagttgatgccgttccagccaatggccagactccaatccagagaaccatcaagccagatgtcagaagctacaccatcacaggtttacaaccaggcactgactacaagatctacctgtacaccttgaatgacaatgctcggagctcccctgtggtcatcgacgcctccactgccattgatgcaccatccaacctgcgtttcctggccaccacacccaattccttgctggtatcatggcagccgccacgtgccaggattaccggctacatcatcaagtatgagaagcctgggtctcctcccagagaagtggtccctcggccccgccctggtgtcacagaggctactattactggtattgctgcttccatgctgtcattttccttcttactacctaggacacatgaagtccttagcaaactcccacagcgtctttgatactgtgtcatgagaatgcgaaactctgttcctgataacctcaaaaagcattctctgtgtaggagtggtagagcctaatacatcccaaaaggcatgagtgaaggaaaatgcaatttcaagactgtactaatggcatgactagactcatgttttcctttcgctgcaagtttgccagatacctgtcaattcagtcctggagaaagatatttttcaaagcatac

SEQ ID NO: 73 - DNA, 8332 bp, Homo sapiens
ggcggggcggggacagcccggcgggtctctcctcccccgcgccccgggcctccagaggggcgggaggggaccgtcccatataagccccggctcccggcgctcggacgcccgcgccggctgtgctgcacagggggaggagagggaaccccaggcgcgagcgggaagaggggacctgcagccacaacttctctggtcctctgcatcccttctgtccctccacccgtccccttccccaccctctggcccccaccttcttggaggcgacaacccccgggaggcattagaagggatttttcccgcaggttgcgaagggaagcaaacttggtggcaacttgcctcccggtgcgggcgtctctcccccaccgtctcaacatgcttaggggtccggggcccgggctgctgctgctggccgtccwgtgcctggggacagcggtgccctccacgggagcctcgaagagcaagaggcaggctcagcaaatggttcagccccagtccccggtggctgtcagtcaaagcaagcccggttgttatgacaatggaaaacactatcagataaatcaacagtgggagcggacctacctaggcaatgcgttggtttgtacttgttatggaggaagccgaggttttaactgcgagagtaaacctgaagctgaagagacttgctttgacaagtacactgggaacacttaccgagtgggtgacacttatgagcgtcctaaagactccatgatctgggactgtacctgcatyggggctgggcgagggagaataagctgtaccatcgcaaaccgctgccatgaagggggtcagtcctacaagattggtgacacctggaggagaccacatgagactggtggttacatgttagagtgtgtgtgtcttggtaatggaaaaggagaatggacctgcaagcccatagctgagaagtgttttgatcatgctgctgggacttcctatgtggtcggagaaacgtgggagaagccctaccaaggctggatgatggtagattgtacttgcctgggagaaggcagcggacgcatcacttgcacttctagaaatagatgcaacgatcaggacacaaggacatcctatagaattggagacacctggagcaagaaggataatcgaggaaacctgctccagtgcatctgcacaggcaacggccgaggagagtggaagtgtgagaggcacacctctgtgcagaccacatcgagcggatctggccccttcaccgatgttcgtgcagctgtttaccaaccgcagcctcacccccagcctcctccctatggccactgtgtcacagacagtggtgtggtctactctgtggggatgcagtggctgaagacacaaggaaataagcaaatgctttgcacgtgcctgggcaacggagtcagctgccaagagacagctgtaacccagacttacggtggcaactcaaatggagagccatgtgtcttaccattcacctacaatggcaggacgttctactcctgcaccacagaagggcgacaggacggacatctttggtgcagcacaacttcgaattatgagcaggaccagaaatactctttctgcacagaccacactgttttggttcagactcgaggaggaaattccaatggtgccttgtgccacttccccttcctatacaacaaccacaattacactgattgcacttctgagggcagaagagacaacatgaagtggtgtgggaccacacagaactatgatgccgaccagaagtttgggttctgccccatggctgcccacgaggaaatctgcacaaccaatgaaggggtcatgtaccgcattggagatcagtgggataagcagcatgacatgggtcacatgatgaggtgcacgtgtgttgggaatggtcgtggggaatggacatgcattgcctactcgcagcttcgagatcagtgcattgttgatgacatcacttacaatgtgaacgacacattccacaagcgtcatgaagaggggcacatgctgaactgtacatgcttcggtcagggtcggggcaggtggaagtgtgatcccgtcgaccaatgccaggattcagagactgggacgttttatcaaattggagattcatgggagaagtatgtgcatggtgtcagataccagtgctactgctatggccgtggcattggggagtggcattgccaacctttacagacctatccaagctcaagtggtcctgtcgaagtatttatcactgagactccgagtcagcccaactcccaccccatccagtggaatgcaccacagccatctcacatttccaagtacattctcaggtggagacctaaaaattctgtaggccgttggaaggaagctaccataccaggccacttaaactcctacaccatcaaaggcctgaagcctggtgtggtatacgagggccagctcatcagcatccagcagtacggccaccaagaagtgactcgctttgacttcaccaccaccagcaccagcacacctgtgaccagcaacaccgtgacaggagagacgactcccttttctcctcttgtggccacttctgaatctgtgaccgaaatcacagccagtagctttgtggtctcctgggtctcagcttccgacaccgtgtcgggattccgggtggaatatgagctgagtgaggagggagatgagccacagtacctggatcttccaagcacagccacttctgtgaacatccctgacctgcttcctggccgaaaatacattgtaaatgtctatcagatatctgaggatggggagcagagtttgatcctgtctacttcacaaacaacagcgcctgatgccccwcctgacmcgactgtggaccaagttgatgacacctcaattgttgttcgctggagcagaccccaggctcccatcacagggtacagaatagtctattcgccatcagtagaaggtagcagcacagaactcaaccttcctgaaactgcaaactccgtcaccctcagtgacttgcaacctggtgttcagtataacatcactatctatgctgtggaagaaaatcaagaaagtacacctgttgtcattcaacaagaaaccactggcaccccacgctcagatacagtgccctctcccagggacctgcagtttgtggaagtgacagacgtgaaggtcaccatcatgtggacaccgcctgagagtgcagtgaccggctaccgtgtggatgtgatccccgtcaacctgcctggcgagcacgggcagaggctgcccatcagcaggaacacctttgcagaagtcaccgggctgtcccctggggtcacctattacttcaaagtctttgcagtgagccatgggagggagagcaagcctctgactgctcaacagacaaccaaactggatgctcccactaacctccagtttgtcaatgaaactgattctactgtcctggtgagatggactccacctcgggcccagataacaggataccgactgaccgtgggccttacccgaagaggmcagcccaggcagtacaatrtgggtccctctgtctccaagtacccmctgaggaatctgcagcctgcatctgagtacaccgtatccctcgtggccataaagggcaaccaagagagccccaaagccactggagtctttaccacactgcagcctgggagctctattccaccttacaacaccgaggtgactgagaccaccattgtgatcacatggacgcctgctccaagaattggttttaagctgggtgtacgaccaagccagggaggagaggcaccacgagaagtgacttcagactcaggaagcatcgttgtgtccggcttgactccaggagtagaatacgtctacaccatccaagtcctgagagatggacaggaaagagatgcgccaattgtaaacaaagtggtgacaccattgtctccaccaacaaacttgcatctggaggcaaaccctgacactggagtgctcacagtctcctgggagaggagcaccaccccagacattactggttatagaattaccacaacccctacaaacggccagcagggaaattctttggaagaagtggtccatgctgatcagagctcctgcacttttgataacctgagtcccggcctggagtacaatgtcagtgtttacactgtcaaggatgacaaggaaagtgtccctatctctgataccatcatcccagctgttcctcctcccactgacctgcgattcaccaacattggtccagacaccatgcgtgtcacctgggctccacccccatccattgatttaaccaacttcctggtgcgttactcacctgtgaaaaatgaggaagatgttgcagagttgtcaatttctccttcagacaatgcagtggtcttaacaaatctcctgcctggtacagaatatgtagtgagtgtctccagtgtctacgaacaacatgagagcacacctcttagaggaagacagaaaacaggtcttgattccccaactggcattgacttttctgatattactgccaactcttttactgtgcactggattgctcctcgagccaccatcactggctacaggatccgccatcatcccgagcacttcagtgggagacctcgagaagatcgggtgccccactctcggaattccatcaccctcaccaacctcactccaggcacagagtatgtggtcagcatcgttgctcttaatggcagagaggaaagtcccttattgattggccaacaatcaacagtttctgatgttccgagggacctggaagttgttgctgcgacccccaccagcctactgatcagctgggatgctcctgctgtcacagtgagatattacaggatcacttacggagaracaggaggaaatagccctgtccaggagttcactgtgcctgggagcaagtctacagctaccatcagcggccttaaacctggagttgattataccatcactgtgtatgctgtcactggccgtggagacagccccgcaagcagcaagccaatttccattaattaccgaacagaaattgacaaaccatcccagatgcaagtgaccgatgttcaggacaacagcattagtgtcaagtggctgccttcaagttcccctgttactggttacagagtaaccaccactcccaaaaatggaccaggaccaacaaaaactaaaactgcaggtccagatcaaacagaaatgactattgaaggcttgcagcccacagtggagtatgtggttagtgtctatgctcagaatccaagcggagagagtcagcctctggttcagactgcagtaaccaacattgatcgccctaaaggactggcattcactgatgtggatgtcgattccatcaaaattgcttgggaaagcccacaggggcaagtttccaggtacagggtgacctactckagccctgaggatggaatccatgagctattccctgcacctgatggtgaagaagacactgcagagctgcaaggcctcagaccgggttctgagtacacagtcagtgtggttgccttgcacgatgatatggagagccagcccctgattggaacccagtccacagctattcctgcaccaactgacctgaagttcactcaggtcacacccacaagcctgagcgcccagtggacaccacccaatgttcagctcactggatatcgagtgcgggtgacccccaaggagaagaccggaccaatgaaagaaatcaaccttgctcctgacagctcatccgtggttgtatcaggacttatggtggccaccaaatatgaagtgagtgtctatgctcttaaggacactttgacaagcagaccagctcagggwgttgtcaccactctggagaatgtcagcccaccaagaagggctcgtgtgacagatgctactgagaccaccatcaccattagctggagaaccaagactgagacgatcactggcttccaagttgatgccgttccagccaatggccagactccaatccagagaaccatcaagccagatgtcagaagctacaccatcacaggtttacaaccaggcactgactacaagatctacctgtacaccttgaatgacaatgctcggagctcccctgtggtcatcgacgcctccactgccattgatgcaccatccaacctgcgtttcctggccaccacacccaattccttgctggtatcatggcagccgccacgtgccaggattaccggctacatcatcaagtatgagaagcctgggtctcctcccagagaagtggtccctcggccccgccctggtgtcacagaggctactattactggcctggaaccgggaaccgaatatacaatttatgtcattgccctgaagaataatcagaagagcgagcccctgattggaaggaaaaagacagacgagcttccccaactggtaacccttccacaccccaatcttcatggaccagagatcttggatgttccttccacagttcaaaagacccctttcgtcacccaccctgggtatgacactggaaatggtattcagcttcctggcacttctggtcagcaacccagtgttgggcaacaaatgatctttgaggaacatggttttaggcggaccacaccgcccacaacggccacccccataaggcataggccaagaccatacccgccgaatgtaggacaagaagctctctctcagacaaccrtctcatgggccccattccaggacacttctgagtacatcatttcatgtcatcctgttggcactgatgaagaacccttacagttcagggttcctggaacttctaccagtgccactctgacaggcctcaccagaggtgccacctacaacrtcatagtggaggcactgaaagaccagcagaggcataaggttcrggaagaggttgttaccgtgggcaactctgtcaacgaaggcttgaaccaacctacggatgactcgtgctttgacccctacacagtttcccattatgccgttggagatgagtgggaacgaatgtctgaatcaggctttaaactgttgtgccagtgcttaggctttggaagtggtcatttcagatgtgattcatctagatggtgccatgacaatggtgtgaactacaagattggagagaagtgggaccgtcagggagaaaatggccagatgatgagctgcacatgtcttgggaacggaaaaggagaattcaagtgtgaccctcatgaggcaacgtgttaygatgatgggaagacataccacgtaggagaacagtggcagaaggaatatctcggtgccatttgctcctgcacatgctttggaggccagcggggctggcgctgtgacaactgccgcagacctgggggtgaacccagtcccgaaggcactactggccagtcctacaaccagtattctcagagataccatcagagaacaaacactaatgttaattgcccaattgagtgcttcatgcctttagatgtacaggctgacagagaagattcccgagagtaaatcatctttccaatccagaggaacaagcatgtctctctgccaagatccatctaaactggagtgatgttagcagacccagcttagagttcttctttctttcttaagccctttgctctggaggaagttctcyagcttcagctcaactcacagcttctccaagcatcaccctgggagtttcctgagggttttctcataaatgagggctgcacattgcctgttctgcttcgaagtattcaataccgctcagtattttaaatgaagtgattctaagatttggtttgggatcaataggaaagcatatgcagccaaccaagatgcaaatgttttgaaatgatatgaccaaaattttaagtaggaaagtcacccaaacacttctgctttcacttaagtgtctggcccgcaatactgtaggaacaagcatgatcttgttactgtgatattttaaatatccacagtactcactttttccaaatgatcctagtaattgcctagaaatatctttctcttacctgttatttatcaatttttcccagtatttttatacggaaaaarttgtattgaaaacacttagtatgcagttgataagaggaatttggtataattatggtgggtgattattttttatactgtatgtgccaaagctttactactgtggaaagacaactgttttaataaaagatttacattccacaacttgaagttcatctatttgatataagacaccttcgggggaaataattcctgtgaatattctttttcaattcagcaaacatttgaaaatctatgatgtgcaagtctaattgttgatttcagtacaagattttctaaatcagttgctacaaaaactgattggtttttgtcacttcatctcttcactaatggagatagcttt

SEQ ID NO: 74 - DNA, 7935 bp, Homo sapiens
ggcggggcggggacagcccggcgggtctctcctcccccgcgccccgggcctccagaggggcgggaggggaccgtcccatataagccccggctcccggcgctcggacgcccgcgccggctgtgctgcacagggggaggagagggaaccccaggcgcgagcgggaagaggggacctgcagccacaacttctctggtcctctgcatcccttctgtccctccacccgtccccttccccaccctctggcccccaccttcttggaggcgacaacccccgggaggcattagaagggatttttcccgcaggttgcgaagggaagcaaacttggtggcaacttgcctcccggtgcgggcgtctctcccccaccgtctcaacatgcttaggggtccggggcccgggctgctgctgctggccgtccwgtgcctggggacagcggtgccctccacgggagcctcgaagagcaagaggcaggctcagcaaatggttcagccccagtccccggtggctgtcagtcaaagcaagcccggttgttatgacaatggaaaacactatcagataaatcaacagtgggagcggacctacctaggcaatgcgttggtttgtacttgttatggaggaagccgaggttttaactgcgagagtaaacctgaagctgaagagacttgctttgacaagtacactgggaacacttaccgagtgggtgacacttatgagcgtcctaaagactccatgatctgggactgtacctgcatyggggctgggcgagggagaataagctgtaccatcgcaaaccgctgccatgaagggggtcagtcctacaagattggtgacacctggaggagaccacatgagactggtggttacatgttagagtgtgtgtgtcttggtaatggaaaaggagaatggacctgcaagcccatagctgagaagtgttttgatcatgctgctgggacttcctatgtggtcggagaaacgtgggagaagccctaccaaggctggatgatggtagattgtacttgcctgggagaaggcagcggacgcatcacttgcacttctagaaatagatgcaacgatcaggacacaaggacatcctatagaattggagacacctggagcaagaaggataatcgaggaaacctgctccagtgcatctgcacaggcaacggccgaggagagtggaagtgtgagaggcacacctctgtgcagaccacatcgagcggatctggccccttcaccgatgttcgtgcagctgtttaccaaccgcagcctcacccccagcctcctccctatggccactgtgtcacagacagtggtgtggtctactctgtggggatgcagtggctgaagacacaaggaaataagcaaatgctttgcacgtgcctgggcaacggagtcagctgccaagagacagctgtaacccagacttacggtggcaactcaaatggagagccatgtgtcttaccattcacctacaatggcaggacgttctactcctgcaccacagaagggcgacaggacggacatctttggtgcagcacaacttcgaattatgagcaggaccagaaatactctttctgcacagaccacactgttttggttcagactcgaggaggaaattccaatggtgccttgtgccacttccccttcctatacaacaaccacaattacactgattgcacttctgagggcagaagagacaacatgaagtggtgtgggaccacacagaactatgatgccgaccagaagtttgggttctgccccatggctgcccacgaggaaatctgcacaaccaatgaaggggtcatgtaccgcattggagatcagtgggataagcagcatgacatgggtcacatgatgaggtgcacgtgtgttgggaatggtcgtggggaatggacatgcattgcctactcgcagcttcgagatcagtgcattgttgatgacatcacttacaatgtgaacgacacattccacaagcgtcatgaagaggggcacatgctgaactgtacatgcttcggtcagggtcggggcaggtggaagtgtgatcccgtcgaccaatgccaggattcagagactgggacgttttatcaaattggagattcatgggagaagtatgtgcatggtgtcagataccagtgctactgctatggccgtggcattggggagtggcattgccaacctttacagacctatccaagctcaagtggtcctgtcgaagtatttatcactgagactccgagtcagcccaactcccaccccatccagtggaatgcaccacagccatctcacatttccaagtacattctcaggtggagacctaaaaattctgtaggccgttggaaggaagctaccataccaggccacttaaactcctacaccatcaaaggcctgaagcctggtgtggtatacgagggccagctcatcagcatccagcagtacggccaccaagaagtgactcgctttgacttcaccaccaccagcaccagcacacctgtgaccagcaacaccgtgacaggagagacgactcccttttctcctcttgtggccacttctgaatctgtgaccgaaatcacagccagtagctttgtggtctcctgggtctcagcttccgacaccgtgtcgggattccgggtggaatatgagctgagtgaggagggagatgagccacagtacctggatcttccaagcacagccacttctgtgaacatccctgacctgcttcctggccgaaaatacattgtaaatgtctatcagatatctgaggatggggagcagagtttgatcctgtctacttcacaaacaacagcgcctgatgccccwcctgacmcgactgtggaccaagttgatgacacctcaattgttgttcgctggagcagaccccaggctcccatcacaggtcagctaaaatagtctattcgccatcagtagaaggtagcagcacagaactcaaccttcctgaaactgcaaactccgtcaccctcagtgacttgcaacctggtgttcagtataacatcactatctatgctgtggaagaaaatcaagaaagtacacctgttgtcattcaacaagaaaccactggcaccccacgctcagatacagtgccctctcccagggacctgcagtttgtggaagtgacagacgtgaaggtcaccatcatgtggacaccgcctgagagtgcagtgaccggctaccgtgtggatgtgatccccgtcaacctgcctggcgagcacgggcagaggctgcccatcagcaggaacacctttgcagaagtcaccgggctgtcccctggggtcacctattacttcaaagtctttgcagtgagccatgggagggagagcaagcctctgactgctcaacagacaaccaaactggatgctcccactaacctccagtttgtcaatgaaactgattctactgtcctggtgagatggactccacctcgggcccagataacaggataccgactgaccgtgggccttacccgaagaggmcagcccaggcagtacaatrtgggtccctctgtctccaagtacccmctgaggaatctgcagcctgcatctgagtacaccgtatccctcgtggccataaagggcaaccaagagagccccaaagccactggagtctttaccacactgcagcctgggagctctattccaccttacaacaccgaggtgactgagaccaccattgtgatcacatggacgcctgctccaagaattggttttaagctgggtgtacgaccaagccagggaggagaggcaccacgagaagtgacttcagactcaggaagcatcgttgtgtccggcttgactccaggagtagaatacgtctacaccatccaagtcctgagagatggacaggaaagagatgcgccaattgtaaacaaagtggtgacaccattgtctccaccaacaaacttgcatctggaggcaaaccctgacactggagtgctcacagtctcctgggagaggagcaccaccccagacattactggttatagaattaccacaacccctacaaacggccagcagggaaattctttggaagaagtggtccatgctgatcagagctcctgcacttttgataacctgagtcccggcctggagtacaatgtcagtgtttacactgtcaaggatgacaaggaaagtgtccctatctctgataccatcatcccagctgttcctcctcccactgacctgcgattcaccaacattggtccagacaccatgcgtgtcacctgggctccacccccatccattgatttaaccaacttcctggtgcgttactcacctgtgaaaaatgaggaagatgttgcagagttgtcaatttctccttcagacaatgcagtggtcttaacaaatctcctgcctggtacagaatatgtagtgagtgtctccagtgtctacgaacaacatgagagcacacctcttagaggaagacagaaaacaggtcttgattccccaactggcattgacttttctgatattactgccaactcttttactgtgcactggattgctcctcgagccaccatcactggctacaggatccgccatcatcccgagcacttcagtgggagacctcgagaagatcgggtgccccactctcggaattccatcaccctcaccaacctcactccaggcacagagtatgtggtcagcatcgttgctcttaatggcagagaggaaagtcccttattgattggccaacaatcaacagtttctgatgttccgagggacctggaagttgttgctgcgacccccaccagcctactgatcagctgggatgctcctgctgtcacagtgagatattacaggatcacttacggagaracaggaggaaatagccctgtccaggagttcactgtgcctgggagcaagtctacagctaccatcagcggccttaaacctggagttgattataccatcactgtgtatgctgtcactggccgtggagacagccccgcaagcagcaagccaatttccattaattaccgaacagaaattgacaaaccatcccagatgcaagtgaccgatgttcaggacaacagcattagtgtcaagtggctgccttcaagttcccctgttactggttacagagtaaccaccactcccaaaaatggaccaggaccaacaaaaactaaaactgcaggtccagatcaaacagaaatgactattgaaggcttgcagcccacagtggagtatgtggttagtgtctatgctcagaatccaagcggagagagtcagcctctggttcagactgcagtaaccactattcctgcaccaactgacctgaagttcactcaggtcacacccacaagcctgagcgcccagtggacaccacccaatgttcagctcactggatatcgagtgcgggtgacccccaaggagaagaccggaccaatgaaagaaatcaaccttgctcctgacagctcatccgtggttgtatcaggacttatggtggccaccaaatatgaagtgagtgtctatgctcttaaggacactttgacaagcagaccagctcagggwgttgtcaccactctggagaatgtcagcccaccaagaagggctcgtgtgacagatgctactgagaccaccatcaccattagctggagaaccaagactgagacgatcactggcttccaagttgatgccgttccagccaatggccagactccaatccagagaaccatcaagccagatgtcagaagctacaccatcacaggtttacaaccaggcactgactacaagatctacctgtacaccttgaatgacaatgctcggagctcccctgtggtcatcgacgcctccactgccattgatgcaccatccaacctgcgtttcctggccaccacacccaattccttgctggtatcatggcagccgccacgtgccaggattaccggctacatcatcaagtatgagaagcctgggtctcctcccagagaagtggtccctcggccccgccctggtgtcacagaggctactattactggcctggaaccgggaaccgaatatacaatttatgtcattgccctgaagaataatcagaagagcgagcccctgattggaaggaaaaagacagttcaaaagacccctttcgtcacccaccctgggtatgacactggaaatggtattcagcttcctggcacttctggtcagcaacccagtgttgggcaacaaatgatctttgaggaacatggttttaggcggaccacaccgcccacaacggccacccccataaggcataggccaagaccatacccgccgaatgtaggacaagaagctctctctcagacaaccrtctcatgggccccattccaggacacttctgagtacatcatttcatgtcatcctgttggcactgatgaagaacccttacagttcagggttcctggaacttctaccagtgccactctgacaggcctcaccagaggtgccacctacaacrtcatagtggaggcactgaaagaccagcagaggcataaggttcrggaagaggttgttaccgtgggcaactctgtcaacgaaggcttgaaccaacctacggatgactcgtgctttgacccctacacagtttcccattatgccgttggagatgagtgggaacgaatgtctgaatcaggctttaaactgttgtgccagtgcttaggctttggaagtggtcatttcagatgtgattcatctagatggtgccatgacaatggtgtgaactacaagattggagagaagtgggaccgtcagggagaaaatggccagatgatgagctgcacatgtcttgggaacggaaaaggagaattcaagtgtgaccctcatgaggcaacgtgttaygatgatgggaagacataccacgtaggagaacagtggcagaaggaatatctcggtgccatttgctcctgcacatgctttggaggccagcggggctggcgctgtgacaactgccgcagacctgggggtgaacccagtcccgaaggcactactggccagtcctacaaccagtattctcagagataccatcagagaacaaacactaatgttaattgcccaattgagtgcttcatgcctttagatgtacaggctgacagagaagattcccgagagtaaatcatctttccaatccagaggaacaagcatgtctctctgccaagatccatctaaactggagtgatgttagcagacccagcttagagttcttctttctttcttaagccctttgctctggaggaagttctcyagcttcagctcaactcacagcttctccaagcatcaccctgggagtttcctgagggttttctcataaatgagggctgcacattgcctgttctgcttcgaagtattcaataccgctcagtattttaaatgaagtgattctaagatttggtttgggatcaataggaaagcatatgcagccaaccaagatgcaaatgttttgaaatgattgtctggcccgcaatactgtaggaacaagcatgatcttgttactgtgatattttaaatatccacagtactcactttttccaaatgatcctagtaattgcctagaaatatctttctcttacctgttatttatcaatttttcccagtatttttatacggaaaaarttgtattgaaaacacttagtatgcagttgataagaggaatttggtataattatggtgggtgattattttttatactgtatgtgccaaagctttactactgtggaaagacaactgttttaataaaagatttacattccacaacttgaagttcatctatttgatataagacaccttcgggggaaataattcctgtgaatattctttttcaattcagcaaacatttgaaaatctatgatgtgcaagtctaattgttgatttcagtacaagattttctaaatcagttgctacaaaaactgattggtttttgtcacttcatctcttcactaatggagatagcttt

SEQ ID NO: 75 - DNA, 2488 bp, Homo sapiens
ggcggggcggggacagcccggcgggtctctcctcccccgcgccccgggcctccagaggggcgggaggggaccgtcccatataagccccggctcccggcgctcggacgcccgcgccggctgtgctgcacagggggaggagagggaaccccaggcgcgagcgggaagaggggacctgcagccacaacttctctggtcctctgcatcccttctgtccctccacccgtccccttccccaccctctggcccccaccttcttggaggcgacaacccccgggaggcattagaagggatttttcccgcaggttgcgaagggaagcaaacttggtggcaacttgcctcccggtgcgggcgtctctcccccaccgtctcaacatgcttaggggtccggggcccgggctgctgctgctggccgtccwgtgcctggggacagcggtgccctccacgggagcctcgaagagcaagaggcaggctcagcaaatggttcagccccagtccccggtggctgtcagtcaaagcaagcccggttgttatgacaatggaaaacactatcagataaatcaacagtgggagcggacctacctaggcaatgcgttggtttgtacttgttatggaggaagccgaggttttaactgcgagagtaaacctgaagctgaagagacttgctttgacaagtacactgggaacacttaccgagtgggtgacacttatgagcgtcctaaagactccatgatctgggactgtacctgcatyggggctgggcgagggagaataagctgtaccatcgcaaaccgctgccatgaagggggtcagtcctacaagattggtgacacctggaggagaccacatgagactggtggttacatgttagagtgtgtgtgtcttggtaatggaaaaggagaatggacctgcaagcccatagctgagaagtgttttgatcatgctgctgggacttcctatgtggtcggagaaacgtgggagaagccctaccaaggctggatgatggtagattgtacttgcctgggagaaggcagcggacgcatcacttgcacttctagaaatagatgcaacgatcaggacacaaggacatcctatagaattggagacacctggagcaagaaggataatcgaggaaacctgctccagtgcatctgcacaggcaacggccgaggagagtggaagtgtgagaggcacacctctgtgcagaccacatcgagcggatctggccccttcaccgatgttcgtgcagctgtttaccaaccgcagcctcacccccagcctcctccctatggccactgtgtcacagacagtggtgtggtctactctgtggggatgcagtggctgaagacacaaggaaataagcaaatgctttgcacgtgcctgggcaacggagtcagctgccaagagacagctgtaacccagacttacggtggcaactcaaatggagagccatgtgtcttaccattcacctacaatggcaggacgttctactcctgcaccacagaagggcgacaggacggacatctttggtgcagcacaacttcgaattatgagcaggaccagaaatactctttctgcacagaccacactgttttggttcagactcgaggaggaaattccaatggtgccttgtgccacttccccttcctatacaacaaccacaattacactgattgcacttctgagggcagaagagacaacatgaagtggtgtgggaccacacagaactatgatgccgaccagaagtttgggttctgccccatggctgcccacgaggaaatctgcacaaccaatgaaggggtcatgtaccgcattggagatcagtgggataagcagcatgacatgggtcacatgatgaggtgcacgtgtgttgggaatggtcgtggggaatggacatgcattgcctactcgcagcttcgagatcagtgcattgttgatgacatcacttacaatgtgaacgacacattccacaagcgtcatgaagaggggcacatgctgaactgtacatgcttcggtcagggtcggggcaggtggaagtgtgatcccgtcgaccaatgccaggattcagagactgggacgttttatcaaattggagattcatgggagaagtatgtgcatggtgtcagataccagtgctactgctatggccgtggcattggggagtggcattgccaacctttacagacctatccaagctcaagtggtcctgtcgaagtatttatcactgagactccgagtcagcccaactcccaccccatccagtggaatgcaccacagccatctcacatttccaagtacattctcaggtggagacctgtgagtatcccacccagaaaccttggatactgagtctcctaatcttatcaattctgatggtttctttttttcccagcttttgagccaacaactctgattaactattcctatagcatttactatatttgtttagtgaacaaacaatatgtggtcaattaaattgacttgtagactg

SEQ ID NO: 76 - DNA, 8371 bp, Homo sapiens
ggcggggcggggacagcccggcgggtctctcctcccccgcgccccgggcctccagaggggcgggaggggaccgtcccatataagccccggctcccggcgctcggacgcccgcgccggctgtgctgcacagggggaggagagggaaccccaggcgcgagcgggaagaggggacctgcagccacaacttctctggtcctctgcatcccttctgtccctccacccgtccccttccccaccctctggcccccaccttcttggaggcgacaacccccgggaggcattagaagggatttttcccgcaggttgcgaagggaagcaaacttggtggcaacttgcctcccggtgcgggcgtctctcccccaccgtctcaacatgcttaggggtccggggcccgggctgctgctgctggccgtccwgtgcctggggacagcggtgccctccacgggagcctcgaagagcaagaggcaggctcagcaaatggttcagccccagtccccggtggctgtcagtcaaagcaagcccggttgttatgacaatggaaaacactatcagataaatcaacagtgggagcggacctacctaggcaatgcgttggtttgtacttgttatggaggaagccgaggttttaactgcgagagtaaacctgaagctgaagagacttgctttgacaagtacactgggaacacttaccgagtgggtgacacttatgagcgtcctaaagactccatgatctgggactgtacctgcatyggggctgggcgagggagaataagctgtaccatcgcaaaccgctgccatgaagggggtcagtcctacaagattggtgacacctggaggagaccacatgagactggtggttacatgttagagtgtgtgtgtcttggtaatggaaaaggagaatggacctgcaagcccatagctgagaagtgttttgatcatgctgctgggacttcctatgtggtcggagaaacgtgggagaagccctaccaaggctggatgatggtagattgtacttgcctgggagaaggcagcggacgcatcacttgcacttctagaaatagatgcaacgatcaggacacaaggacatcctatagaattggagacacctggagcaagaaggataatcgaggaaacctgctccagtgcatctgcacaggcaacggccgaggagagtggaagtgtgagaggcacacctctgtgcagaccacatcgagcggatctggccccttcaccgatgttcgtgcagctgtttaccaaccgcagcctcacccccagcctcctccctatggccactgtgtcacagacagtggtgtggtctactctgtggggatgcagtggctgaagacacaaggaaataagcaaatgctttgcacgtgcctgggcaacggagtcagctgccaagagacagctgtaacccagacttacggtggcaactcaaatggagagccatgtgtcttaccattcacctacaatggcaggacgttctactcctgcaccacagaagggcgacaggacggacatctttggtgcagcacaacttcgaattatgagcaggaccagaaatactctttctgcacagaccacactgttttggttcagactcgaggaggaaattccaatggtgccttgtgccacttccccttcctatacaacaaccacaattacactgattgcacttctgagggcagaagagacaacatgaagtggtgtgggaccacacagaactatgatgccgaccagaagtttgggttctgccccatggctgcccacgaggaaatctgcacaaccaatgaaggggtcatgtaccgcattggagatcagtgggataagcagcatgacatgggtcacatgatgaggtgcacgtgtgttgggaatggtcgtggggaatggacatgcattgcctactcgcagcttcgagatcagtgcattgttgatgacatcacttacaatgtgaacgacacattccacaagcgtcatgaagaggggcacatgctgaactgtacatgcttcggtcagggtcggggcaggtggaagtgtgatcccgtcgaccaatgccaggattcagagactgggacgttttatcaaattggagattcatgggagaagtatgtgcatggtgtcagataccagtgctactgctatggccgtggcattggggagtggcattgccaacctttacagacctatccaagctcaagtggtcctgtcgaagtatttatcactgagactccgagtcagcccaactcccaccccatccagtggaatgcaccacagccatctcacatttccaagtacattctcaggtggagacctaaaaattctgtaggccgttggaaggaagctaccataccaggccacttaaactcctacaccatcaaaggcctgaagcctggtgtggtatacgagggccagctcatcagcatccagcagtacggccaccaagaagtgactcgctttgacttcaccaccaccagcaccagcacacctgtgaccagcaacaccgtgacaggagagacgactcccttttctcctcttgtggccacttctgaatctgtgaccgaaatcacagccagtagctttgtggtctcctgggtctcagcttccgacaccgtgtcgggattccgggtggaatatgagctgagtgaggagggagatgagccacagtacctggatcttccaagcacagccacttctgtgaacatccctgacctgcttcctggccgaaaatacattgtaaatgtctatcagatatctgaggatggggagcagagtttgatcctgtctacttcacaaacaacagcgcctgatgccccwcctgacmcgactgtggaccaagttgatgacacctcaattgttgttcgctggagcagaccccaggctcccatcacagggtacagaatagtctattcgccatcagtagaaggtagcagcacagaactcaaccttcctgaaactgcaaactccgtcaccctcagtgacttgcaacctggtgttcagtataacatcactatctatgctgtggaagaaaatcaagaaagtacacctgttgtcattcaacaagaaaccactggcaccccacgctcagatacagtgccctctcccagggacctgcagtttgtggaagtgacagacgtgaaggtcaccatcatgtggacaccgcctgagagtgcagtgaccggctaccgtgtggatgtgatccccgtcaacctgcctggcgagcacgggcagaggctgcccatcagcaggaacacctttgcagaagtcaccgggctgtcccctggggtcacctattacttcaaagtctttgcagtgagccatgggagggagagcaagcctctgactgctcaacagacaaccaaactggatgctcccactaacctccagtttgtcaatgaaactgattctactgtcctggtgagatggactccacctcgggcccagataacaggataccgactgaccgtgggccttacccgaagaggmcagcccaggcagtacaatrtgggtccctctgtctccaagtacccmctgaggaatctgcagcctgcatctgagtacaccgtatccctcgtggccataaagggcaaccaagagagccccaaagccactggagtctttaccacactgcagcctgggagctctattccaccttacaacaccgaggtgactgagaccaccattgtgatcacatggacgcctgctccaagaattggttttaagctgggtgtacgaccaagccagggaggagaggcaccacgagaagtgacttcagactcaggaagcatcgttgtgtccggcttgactccaggagtagaatacgtctacaccatccaagtcctgagagatggacaggaaagagatgcgccaattgtaaacaaagtggtgacaccattgtctccaccaacaaacttgcatctggaggcaaaccctgacactggagtgctcacagtctcctgggagaggagcaccaccccagacattactggttatagaattaccacaacccctacaaacggccagcagggaaattctttggaagaagtggtccatgctgatcagagctcctgcacttttgataacctgagtcccggcctggagtacaatgtcagtgtttacactgtcaaggatgacaaggaaagtgtccctatctctgataccatcatcccagctgttcctcctcccactgacctgcgattcaccaacattggtccagacaccatgcgtgtcacctgggctccacccccatccattgatttaaccaacttcctggtgcgttactcacctgtgaaaaatgaggaagatgttgcagagttgtcaatttctccttcagacaatgcagtggtcttaacaaatctcctgcctggtacagaatatgtagtgagtgtctccagtgtctacgaacaacatgagagcacacctcttagaggaagacagaaaacaggtcttgattccccaactggcattgacttttctgatattactgccaactcttttactgtgcactggattgctcctcgagccaccatcactggctacaggatccgccatcatcccgagcacttcagtgggagacctcgagaagatcgggtgccccactctcggaattccatcaccctcaccaacctcactccaggcacagagtatgtggtcagcatcgttgctcttaatggcagagaggaaagtcccttattgattggccaacaatcaacagtttctgatgttccgagggacctggaagttgttgctgcgacccccaccagcctactgatcagctgggatgctcctgctgtcacagtgagatattacaggatcacttacggagaracaggaggaaatagccctgtccaggagttcactgtgcctgggagcaagtctacagctaccatcagcggccttaaacctggagttgattataccatcactgtgtatgctgtcactggccgtggagacagccccgcaagcagcaagccaatttccattaattaccgaacagaaattgacaaaccatcccagatgcaagtgaccgatgttcaggacaacagcattagtgtcaagtggctgccttcaagttcccctgttactggttacagagtaaccaccactcccaaaaatggaccaggaccaacaaaaactaaaactgcaggtccagatcaaacagaaatgactattgaaggcttgcagcccacagtggagtatgtggttagtgtctatgctcagaatccaagcggagagagtcagcctctggttcagactgcagtaaccaacattgatcgccctaaaggactggcattcactgatgtggatgtcgattccatcaaaattgcttgggaaagcccacaggggcaagtttccaggtacagggtgacctactckagccctgaggatggaatccatgagctattccctgcacctgatggtgaagaagacactgcagagctgcaaggcctcagaccgggttctgagtacacagtcagtgtggttgccttgcacgatgatatggagagccagcccctgattggaacccagtccacagctattcctgcaccaactgacctgaagttcactcaggtcacacccacaagcctgagcgcccagtggacaccacccaatgttcagctcactggatatcgagtgcgggtgacccccaaggagaagaccggaccaatgaaagaaatcaaccttgctcctgacagctcatccgtggttgtatcaggacttatggtggccaccaaatatgaagtgagtgtctatgctcttaaggacactttgacaagcagaccagctcagggwgttgtcaccactctggagaatgtcagcccaccaagaagggctcgtgtgacagatgctactgagaccaccatcaccattagctggagaaccaagactgagacgatcactggcttccaagttgatgccgttccagccaatggccagactccaatccagagaaccatcaagccagatgtcagaagctacaccatcacaggtttacaaccaggcactgactacaagatctacctgtacaccttgaatgacaatgctcggagctcccctgtggtcatcgacgcctccactgccattgatgcaccatccaacctgcgtttcctggccaccacacccaattccttgctggtatcatggcagccgccacgtgccaggattaccggctacatcatcaagtatgagaagcctgggtctcctcccagagaagtggtccctcggccccgccctggtgtcacagaggctactattactggcctggaaccgggaaccgaatatacaatttatgtcattgccctgaagaataatcagaagagcgagcccctgattggaaggaaaaagacagacgagcttccccaactggtaacccttccacaccccaatcttcatggaccagagatcttggatgttccttccacagttcaaaagacccctttcgtcacccaccctgggtatgacactggaaatggtattcagcttcctggcacttctggtcagcaacccagtgttgggcaacaaatgatctttgaggaacatggttttaggcggaccacaccgcccacaacggccacccccataaggcataggccaagaccatacccgccgaatgtaggtgaggaaatccaaattggtcacatccccagggaagatgtagactatcacctgtacccacacggtccggkactcaatccaaatgcctctacaggacaagaagctctctctcagacaaccrtctcatgggccccattccaggacacttctgagtacatcatttcatgtcatcctgttggcactgatgaagaacccttacagttcagggttcctggaacttctaccagtgccactctgacaggcctcaccagaggtgccacctacaacrtcatagtggaggcactgaaagaccagcagaggcataaggttcrggaagaggttgttaccgtgggcaactctgtcaacgaaggcttgaaccaacctacggatgactcgtgctttgacccctacacagtttcccattatgccgttggagatgagtgggaacgaatgtctgaatcaggctttaaactgttgtgccagtgcttaggctttggaagtggtcatttcagatgtgattcatctagatggtgccatgacaatggtgtgaactacaagattggagagaagtgggaccgtcagggagaaaatggccagatgatgagctgcacatgtcttgggaacggaaaaggagaattcaagtgtgaccctcatgaggcaacgtgttaygatgatgggaagacataccacgtaggagaacagtggcagaaggaatatctcggtgccatttgctcctgcacatgctttggaggccagcggggctggcgctgtgacaactgccgcagacctgggggtgaacccagtcccgaaggcactactggccagtcctacaaccagtattctcagagataccatcagagaacaaacactaatgttaattgcccaattgagtgcttcatgcctttagatgtacaggctgacagagaagattcccgagagtaaatcatctttccaatccagaggaacaagcatgtctctctgccaagatccatctaaactggagtgatgttagcagacccagcttagagttcttctttctttcttaagccctttgctctggaggaagttctcyagcttcagctcaactcacagcttctccaagcatcaccctgggagtttcctgagggttttctcataaatgagggctgcacattgcctgttctgcttcgaagtattcaataccgctcagtattttaaatgaagtgattctaagatttggtttgggatcaataggaaagcatatgcagccaaccaagatgcaaatgttttgaaatgattgtctggcccgcaatactgtaggaacaagcatgatcttgttactgtgatattttaaatatccacagtactcactttttccaaatgatcctagtaattgcctagaaatatctttctcttacctgttatttatcaatttttcccagtatttttatacggaaaaarttgtattgaaaacacttagtatgcagttgataagaggaatttggtataattatggtgggtgattattttttatactgtatgtgccaaagctttactactgtggaaagacaactgttttaataaaagatttacattccacaacttgaagttcatctatttgatataagacaccttcgggggaaataattcctgtgaatattctttttcaattcagcaaacatttgaaaatctatgatgtgcaagtctaattgttgatttcagtacaagattttctaaatcagttgctacaaaaactgattggtttttgtcacttcatctcttcactaatggagatagcttt

SEQ ID NO: 77 - DNA, 7823 bp, Homo sapiens
ggcggggcggggacagcccggcgggtctctcctcccccgcgccccgggcctccagaggggcgggaggggaccgtcccatataagccccggctcccggcgctcggacgcccgcgccggctgtgctgcacagggggaggagagggaaccccaggcgcgagcgggaagaggggacctgcagccacaacttctctggtcctctgcatcccttctgtccctccacccgtccccttccccaccctctggcccccaccttcttggaggcgacaacccccgggaggcattagaagggatttttcccgcaggttgcgaagggaagcaaacttggtggcaacttgcctcccggtgcgggcgtctctcccccaccgtctcaacatgcttaggggtccggggcccgggctgctgctgctggccgtccwgtgcctggggacagcggtgccctccacgggagcctcgaagagcaagaggcaggctcagcaaatggttcagccccagtccccggtggctgtcagtcaaagcaagcccggttgttatgacaatggaaaacactatcagataaatcaacagtgggagcggacctacctaggcaatgcgttggtttgtacttgttatggaggaagccgaggttttaactgcgagagtaaacctgaagctgaagagacttgctttgacaagtacactgggaacacttaccgagtgggtgacacttatgagcgtcctaaagactccatgatctgggactgtacctgcatyggggctgggcgagggagaataagctgtaccatcgcaaaccgctgccatgaagggggtcagtcctacaagattggtgacacctggaggagaccacatgagactggtggttacatgttagagtgtgtgtgtcttggtaatggaaaaggagaatggacctgcaagcccatagctgagaagtgttttgatcatgctgctgggacttcctatgtggtcggagaaacgtgggagaagccctaccaaggctggatgatggtagattgtacttgcctgggagaaggcagcggacgcatcacttgcacttctagaaatagatgcaacgatcaggacacaaggacatcctatagaattggagacacctggagcaagaaggataatcgaggaaacctgctccagtgcatctgcacaggcaacggccgaggagagtggaagtgtgagaggcacacctctgtgcagaccacatcgagcggatctggccccttcaccgatgttcgtgcagctgtttaccaaccgcagcctcacccccagcctcctccctatggccactgtgtcacagacagtggtgtggtctactctgtggggatgcagtggctgaagacacaaggaaataagcaaatgctttgcacgtgcctgggcaacggagtcagctgccaagagacagctgtaacccagacttacggtggcaactcaaatggagagccatgtgtcttaccattcacctacaatggcaggacgttctactcctgcaccacagaagggcgacaggacggacatctttggtgcagcacaacttcgaattatgagcaggaccagaaatactctttctgcacagaccacactgttttggttcagactcgaggaggaaattccaatggtgccttgtgccacttccccttcctatacaacaaccacaattacactgattgcacttctgagggcagaagagacaacatgaagtggtgtgggaccacacagaactatgatgccgaccagaagtttgggttctgccccatggctgcccacgaggaaatctgcacaaccaatgaaggggtcatgtaccgcattggagatcagtgggataagcagcatgacatgggtcacatgatgaggtgcacgtgtgttgggaatggtcgtggggaatggacatgcattgcctactcgcagcttcgagatcagtgcattgttgatgacatcacttacaatgtgaacgacacattccacaagcgtcatgaagaggggcacatgctgaactgtacatgcttcggtcagggtcggggcaggtggaagtgtgatcccgtcgaccaatgccaggattcagagactgggacgttttatcaaattggagattcatgggagaagtatgtgcatggtgtcagataccagtgctactgctatggccgtggcattggggagtggcattgccaacctttacagacctatccaagctcaagtggtcctgtcgaagtatttatcactgagactccgagtcagcccaactcccaccccatccagtggaatgcaccacagccatctcacatttccaagtacattctcaggtggagacctaaaaattctgtaggccgttggaaggaagctaccataccaggccacttaaactcctacaccatcaaaggcctgaagcctggtgtggtatacgagggccagctcatcagcatccagcagtacggccaccaagaagtgactcgctttgacttcaccaccaccagcaccagcacacctgtgaccagcaacaccgtgacaggagagacgactcccttttctcctcttgtggccacttctgaatctgtgaccgaaatcacagccagtagctttgtggtctcctgggtctcagcttccgacaccgtgtcgggattccgggtggaatatgagctgagtgaggagggagatgagccacagtacctggatcttccaagcacagccacttctgtgaacatccctgacctgcttcctggccgaaaatacattgtaaatgtctatcagatatctgaggatggggagcagagtttgatcctgtctacttcacaaacaacagcgcctgatgccccwcctgacmcgactgtggaccaagttgatgacacctcaattgttgttcgctggagcagaccccaggctcccatcacagggtacagaatagtctattcgccatcagtagaaggtagcagcacagaactcaaccttcctgaaactgcaaactccgtcaccctcagtgacttgcaacctggtgttcagtataacatcactatctatgctgtggaagaaaatcaagaaagtacacctgttgtcattcaacaagaaaccactggcaccccacgctcagatacagtgccctctcccagggacctgcagtttgtggaagtgacagacgtgaaggtcaccatcatgtggacaccgcctgagagtgcagtgaccggctaccgtgtggatgtgatccccgtcaacctgcctggcgagcacgggcagaggctgcccatcagcaggaacactctttgcagtgagccatgggagggagagcaagcctctgactgctcaacagacaaccaaactggatgctcccactaacctccagtttgtcaatgaaactgattctactgtcctggtgagatggactccacctcgggcccagataacaggataccgactgaccgtgggccttacccgaagaggmcagcccaggcagtacaatrtgggtccctctgtctccaagtacccmctgaggaatctgcagcctgcatctgagtacaccgtatccctcgtggccataaagggcaaccaagagagccccaaagccactggagtctttaccacactgcagcctgggagctctattccaccttacaacaccgaggtgactgagaccaccattgtgatcacatggacgcctgctccaagaattggttttaagctgggtgtacgaccaagccagggaggagaggcaccacgagaagtgacttcagactcaggaagcatcgttgtgtccggcttgactccaggagtagaatacgtctacaccatccaagtcctgagagatggacaggaaagagatgcgccaattgtaaacaaagtggtgacaccattgtctccaccaacaaacttgcatctggaggcaaaccctgacactggagtgctcacagtctcctgggagaggagcaccaccccagacattactggttatagaattaccacaacccctacaaacggccagcagggaaattctttggaagaagtggtccatgctgatcagagctcctgcacttttgataacctgagtcccggcctggagtacaatgtcagtgtttacactgtcaaggatgacaaggaaagtgtccctatctctgataccatcatcccagaggtgccccaactcactgacytaagctttgttgatataacygattcaagcatcggcctgaggtggaccccgctaaactcttccaccattattgggtaccgcatcacagtagttgcggcaggagaaggtatccctatttttgaagattttgtggactcctcagtaggatactacacagtcacagggctggagccgggcattgactatgatatcagcgttatcactctcattaatggcggcgagagtgcccctactacactgacacaacaaacggctgttcctcctcccactgacctgcgattcaccaacattggtccagacaccatgcgtgtcacctgggctccacccccatccattgatttaaccaacttcctggtgcgttactcacctgtgaaaaatgaggaagatgttgcagagttgtcaatttctccttcagacaatgcagtggtcttaacaaatctcctgcctggtacagaatatgtagtgagtgtctccagtgtctacgaacaacatgagagcacacctcttagaggaagacagaaaacaggtcttgattccccaactggcattgacttttctgatattactgccaactcttttactgtgcactggattgctcctcgagccaccatcactggctacaggatccgccatcatcccgagcacttcagtgggagacctcgagaagatcgggtgccccactctcggaattccatcaccctcaccaacctcactccaggcacagagtatgtggtcagcatcgttgctcttaatggcagagaggaaagtcccttattgattggccaacaatcaacagtttctgatgttccgagggacctggaagttgttgctgcgacccccaccagcctactgatcagctgggatgctcctgctgtcacagtgagatattacaggatcacttacggagaracaggaggaaatagccctgtccaggagttcactgtgcctgggagcaagtctacagctaccatcagcggccttaaacctggagttgattataccatcactgtgtatgctgtcactggccgtggagacagccccgcaagcagcaagccaatttccattaattaccgaacagaaattgacaaaccatcccagatgcaagtgaccgatgttcaggacaacagcattagtgtcaagtggctgccttcaagttcccctgttactggttacagagtaaccaccactcccaaaaatggaccaggaccaacaaaaactaaaactgcaggtccagatcaaacagaaatgactattgaaggcttgcagcccacagtggagtatgtggttagtgtctatgctcagaatccaagcggagagagtcagcctctggttcagactgcagtaaccaacattgatcgccctaaaggactggcattcactgatgtggatgtcgattccatcaaaattgcttgggaaagcccacaggggcaagtttccaggtacagggtgacctactckagccctgaggatggaatccatgagctattccctgcacctgatggtgaagaagacactgcagagctgcaaggcctcagaccgggttctgagtacacagtcagtgtggttgccttgcacgatgatatggagagccagcccctgattggaacccagtccacagctattcctgcaccaactgacctgaagttcactcaggtcacacccacaagcctgagcgcccagtggacaccacccaatgttcagctcactggatatcgagtgcgggtgacccccaaggagaagaccggaccaatgaaagaaatcaaccttgctcctgacagctcatccgtggttgtatcaggacttatggtggccaccaaatatgaagtgagtgtctatgctcttaaggacactttgacaagcagaccagctcagggwgttgtcaccactctggagaatgtcagcccaccaagaagggctcgtgtgacagatgctactgagaccaccatcaccattagctggagaaccaagactgagacgatcactggcttccaagttgatgccgttccagccaatggccagactccaatccagagaaccatcaagccagatgtcagaagctacaccatcacaggtttacaaccaggcactgactacaagatctacctgtacaccttgaatgacaatgctcggagctcccctgtggtcatcgacgcctccactgccattgatgcaccatccaacctgcgtttcctggccaccacacccaattccttgctggtatcatggcagccgccacgtgccaggattaccggctacatcatcaagtatgagaagcctgggtctcctcccagagaagtggtccctcggccccgccctggtgtcacagaggctactattactggcctggaaccgggaaccgaatatacaatttatgtcattgccctgaagaataatcagaagagcgagcccctgattggaaggaaaaagacaggatggtgccatgacaatggtgtgaactacaagattggagagaagtgggaccgtcagggagaaaatggccagatgatgagctgcacatgtcttgggaacggaaaaggagaattcaagtgtgaccctcatgaggcaacgtgttaygatgatgggaagacataccacgtaggagaacagtggcagaaggaatatctcggtgccatttgctcctgcacatgctttggaggccagcggggctggcgctgtgacaactgccgcagacctgggggtgaacccagtcccgaaggcactactggccagtcctacaaccagtattctcagagataccatcagagaacaaacactaatgttaattgcccaattgagtgcttcatgcctttagatgtacaggctgacagagaagattcccgagagtaaatcatctttccaatccagaggaacaagcatgtctctctgccaagatccatctaaactggagtgatgttagcagacccagcttagagttcttctttctttcttaagccctttgctctggaggaagttctcyagcttcagctcaactcacagcttctccaagcatcaccctgggagtttcctgagggttttctcataaatgagggctgcacattgcctgttctgcttcgaagtattcaataccgctcagtattttaaatgaagtgattctaagatttggtttgggatcaataggaaagcatatgcagccaaccaagatgcaaatgttttgaaatgattgtctggcccgcaatactgtaggaacaagcatgatcttgttactgtgatattttaaatatccacagtactcactttttccaaatgatcctagtaattgcctagaaatatctttctcttacctgttatttatcaatttttcccagtatttttatacggaaaaarttgtattgaaaacacttagtatgcagttgataagaggaatttggtataattatggtgggtgattattttttatactgtatgtgccaaagctttactactgtggaaagacaactgttttaataaaagatttacattccacaacttgaagttcatctatttgatataagacaccttcgggggaaataattcctgtgaatattctttttcaattcagcaaacatttgaaaatctatgatgtgcaagtctaattgttgatttcagtacaagattttctaaatcagttgctacaaaaactgattggtttttgtcacttcatctcttcactaatggagatagcttt

SEQ ID NO: 78 - DNA, 7848 bp, Homo sapiens
ggcggggcggggacagcccggcgggtctctcctcccccgcgccccgggcctccagaggggcgggaggggaccgtcccatataagccccggctcccggcgctcggacgcccgcgccggctgtgctgcacagggggaggagagggaaccccaggcgcgagcgggaagaggggacctgcagccacaacttctctggtcctctgcatcccttctgtccctccacccgtccccttccccaccctctggcccccaccttcttggaggcgacaacccccgggaggcattagaagggatttttcccgcaggttgcgaagggaagcaaacttggtggcaacttgcctcccggtgcgggcgtctctcccccaccgtctcaacatgcttaggggtccggggcccgggctgctgctgctggccgtccwgtgcctggggacagcggtgccctccacgggagcctcgaagagcaagaggcaggctcagcaaatggttcagccccagtccccggtggctgtcagtcaaagcaagcccggttgttatgacaatggaaaacactatcagataaatcaacagtgggagcggacctacctaggcaatgcgttggtttgtacttgttatggaggaagccgaggttttaactgcgagagtaaacctgaagctgaagagacttgctttgacaagtacactgggaacacttaccgagtgggtgacacttatgagcgtcctaaagactccatgatctgggactgtacctgcatyggggctgggcgagggagaataagctgtaccatcgcaaaccgctgccatgaagggggtcagtcctacaagattggtgacacctggaggagaccacatgagactggtggttacatgttagagtgtgtgtgtcttggtaatggaaaaggagaatggacctgcaagcccatagctgagaagtgttttgatcatgctgctgggacttcctatgtggtcggagaaacgtgggagaagccctaccaaggctggatgatggtagattgtacttgcctgggagaaggcagcggacgcatcacttgcacttctagaaatagatgcaacgatcaggacacaaggacatcctatagaattggagacacctggagcaagaaggataatcgaggaaacctgctccagtgcatctgcacaggcaacggccgaggagagtggaagtgtgagaggcacacctctgtgcagaccacatcgagcggatctggccccttcaccgatgttcgtgcagctgtttaccaaccgcagcctcacccccagcctcctccctatggccactgtgtcacagacagtggtgtggtctactctgtggggatgcagtggctgaagacacaaggaaataagcaaatgctttgcacgtgcctgggcaacggagtcagctgccaagagacagctgtaacccagacttacggtggcaactcaaatggagagccatgtgtcttaccattcacctacaatggcaggacgttctactcctgcaccacagaagggcgacaggacggacatctttggtgcagcacaacttcgaattatgagcaggaccagaaatactctttctgcacagaccacactgttttggttcagactcgaggaggaaattccaatggtgccttgtgccacttccccttcctatacaacaaccacaattacactgattgcacttctgagggcagaagagacaacatgaagtggtgtgggaccacacagaactatgatgccgaccagaagtttgggttctgccccatggctgcccacgaggaaatctgcacaaccaatgaaggggtcatgtaccgcattggagatcagtgggataagcagcatgacatgggtcacatgatgaggtgcacgtgtgttgggaatggtcgtggggaatggacatgcattgcctactcgcagcttcgagatcagtgcattgttgatgacatcacttacaatgtgaacgacacattccacaagcgtcatgaagaggggcacatgctgaactgtacatgcttcggtcagggtcggggcaggtggaagtgtgatcccgtcgaccaatgccaggattcagagactgggacgttttatcaaattggagattcatgggagaagtatgtgcatggtgtcagataccagtgctactgctatggccgtggcattggggagtggcattgccaacctttacagacctatccaagctcaagtggtcctgtcgaagtatttatcactgagactccgagtcagcccaactcccaccccatccagtggaatgcaccacagccatctcacatttccaagtacattctcaggtggagacctaaaaattctgtaggccgttggaaggaagctaccataccaggccacttaaactcctacaccatcaaaggcctgaagcctggtgtggtatacgagggccagctcatcagcatccagcagtacggccaccaagaagtgactcgctttgacttcaccaccaccagcaccagcacacctgtgaccagcaacaccgtgacaggagagacgactcccttttctcctcttgtggccacttctgaatctgtgaccgaaatcacagccagtagctttgtggtctcctgggtctcagcttccgacaccgtgtcgggattccgggtggaatatgagctgagtgaggagggagatgagccacagtacctggatcttccaagcacagccacttctgtgaacatccctgacctgcttcctggccgaaaatacattgtaaatgtctatcagatatctgaggatggggagcagagtttgatcctgtctacttcacaaacaacagcgcctgatgccccwcctgacmcgactgtggaccaagttgatgacacctcaattgttgttcgctggagcagaccccaggctcccatcacaggtcagctaaaatagtctattcgccatcagtagaaggtagcagcacagaactcaaccttcctgaaactgcaaactccgtcaccctcagtgacttgcaacctggtgttcagtataacatcactatctatgctgtggaagaaaatcaagaaagtacacctgttgtcattcaacaagaaaccactggcaccccacgctcagatacagtgccctctcccagggacctgcagtttgtggaagtgacagacgtgaaggtcaccatcatgtggacaccgcctgagagtgcagtgaccggctaccgtgtggatgtgatccccgtcaacctgcctggcgagcacgggcagaggctgcccatcagcaggaacacctttgcagaagtcaccgggctgtcccctggggtcacctattacttcaaagtctttgcagtgagccatgggagggagagcaagcctctgactgctcaacagacaaccaaactggatgctcccactaacctccagtttgtcaatgaaactgattctactgtcctggtgagatggactccacctcgggcccagataacaggataccgactgaccgtgggccttacccgaagaggmcagcccaggcagtacaatrtgggtccctctgtctccaagtacccmctgaggaatctgcagcctgcatctgagtacaccgtatccctcgtggccataaagggcaaccaagagagccccaaagccactggagtctttaccacactgcagcctgggagctctattccaccttacaacaccgaggtgactgagaccaccattgtgatcacatggacgcctgctccaagaattggttttaagctgggtgtacgaccaagccagggaggagaggcaccacgagaagtgacttcagactcaggaagcatcgttgtgtccggcttgactccaggagtagaatacgtctacaccatccaagtcctgagagatggacaggaaagagatgcgccaattgtaaacaaagtggtgacaccattgtctccaccaacaaacttgcatctggaggcaaaccctgacactggagtgctcacagtctcctgggagaggagcaccaccccagacattactggttatagaattaccacaacccctacaaacggccagcagggaaattctttggaagaagtggtccatgctgatcagagctcctgcacttttgataacctgagtcccggcctggagtacaatgtcagtgtttacactgtcaaggatgacaaggaaagtgtccctatctctgataccatcatcccagctgttcctcctcccactgacctgcgattcaccaacattggtccagacaccatgcgtgtcacctgggctccacccccatccattgatttaaccaacttcctggtgcgttactcacctgtgaaaaatgaggaagatgttgcagagttgtcaatttctccttcagacaatgcagtggtcttaacaaatctcctgcctggtacagaatatgtagtgagtgtctccagtgtctacgaacaacatgagagcacacctcttagaggaagacagaaaacaggtcttgattccccaactggcattgacttttctgatattactgccaactcttttactgtgcactggattgctcctcgagccaccatcactggctacaggatccgccatcatcccgagcacttcagtgggagacctcgagaagatcgggtgccccactctcggaattccatcaccctcaccaacctcactccaggcacagagtatgtggtcagcatcgttgctcttaatggcagagaggaaagtcccttattgattggccaacaatcaacagtttctgatgttccgagggacctggaagttgttgctgcgacccccaccagcctactgatcagctgggatgctcctgctgtcacagtgagatattacaggatcacttacggagaracaggaggaaatagccctgtccaggagttcactgtgcctgggagcaagtctacagctaccatcagcggccttaaacctggagttgattataccatcactgtgtatgctgtcactggccgtggagacagccccgcaagcagcaagccaatttccattaattaccgaacagaaattgacaaaccatcccagatgcaagtgaccgatgttcaggacaacagcattagtgtcaagtggctgccttcaagttcccctgttactggttacagagtaaccaccactcccaaaaatggaccaggaccaacaaaaactaaaactgcaggtccagatcaaacagaaatgactattgaaggcttgcagcccacagtggagtatgtggttagtgtctatgctcagaatccaagcggagagagtcagcctctggttcagactgcagtaaccaacattgatcgccctaaaggactggcattcactgatgtggatgtcgattccatcaaaattgcttgggaaagcccacaggggcaagtttccaggtacagggtgacctactckagccctgaggatggaatccatgagctattccctgcacctgatggtgaagaagacactgcagagctgcaaggcctcagaccgggttctgagtacacagtcagtgtggttgccttgcacgatgatatggagagccagcccctgattggaacccagtccacagctattcctgcaccaactgacctgaagttcactcaggtcacacccacaagcctgagcgcccagtggacaccacccaatgttcagctcactggatatcgagtgcgggtgacccccaaggagaagaccggaccaatgaaagaaatcaaccttgctcctgacagctcatccgtggttgtatcaggacttatggtggccaccaaatatgaagtgagtgtctatgctcttaaggacactttgacaagcagaccagctcagggwgttgtcaccactctggagaatgtcagcccaccaagaagggctcgtgtgacagatgctactgagaccaccatcaccattagctggagaaccaagactgagacgatcactggcttccaagttgatgccgttccagccaatggccagactccaatccagagaaccatcaagccagatgtcagaagctacaccatcacaggtttacaaccaggcactgactacaagatctacctgtacaccttgaatgacaatgctcggagctcccctgtggtcatcgacgcctccactgccattgatgcaccatccaacctgcgtttcctggccaccacacccaattccttgctggtatcatggcagccgccacgtgccaggattaccggctacatcatcaagtatgagaagcctgggtctcctcccagagaagtggtccctcggccccgccctggtgtcacagaggctactattactggcctggaaccgggaaccgaatatacaatttatgtcattgccctgaagaataatcagaagagcgagcccctgattggaaggaaaaagacaggacaagaagctctctctcagacaaccrtctcatgggccccattccaggacacttctgagtacatcatttcatgtcatcctgttggcactgatgaagaacccttacagttcagggttcctggaacttctaccagtgccactctgacaggcctcaccagaggtgccacctacaacrtcatagtggaggcactgaaagaccagcagaggcataaggttcrggaagaggttgttaccgtgggcaactctggatggtgccatgacaatggtgtgaactacaagattggagagaagtgggaccgtcagggagaaaatggccagatgatgagctgcacatgtcttgggaacggaaaaggagaattcaagtgtgaccctcatgaggcaacgtgttaygatgatgggaagacataccacgtaggagaacagtggcagaaggaatatctcggtgccatttgctcctgcacatgctttggaggccagcggggctggcgctgtgacaactgccgcagacctgggggtgaacccagtcccgaaggcactactggccagtcctacaaccagtattctcagagataccatcagagaacaaacactaatgttaattgcccaattgagtgcttcatgcctttagatgtacaggctgacagagaagattcccgagagtaaatcatctttccaatccagaggaacaagcatgtctctctgccaagatccatctaaactggagtgatgttagcagacccagcttagagttcttctttctttcttaagccctttgctctggaggaagttctcyagcttcagctcaactcacagcttctccaagcatcaccctgggagtttcctgagggttttctcataaatgagggctgcacattgcctgttctgcttcgaagtattcaataccgctcagtattttaaatgaagtgattctaagatttggtttgggatcaataggaaagcatatgcagccaaccaagatgcaaatgttttgaaatgattgtctggcccgcaatactgtaggaacaagcatgatcttgttactgtgatattttaaatatccacagtactcactttttccaaatgatcctagtaattgcctagaaatatctttctcttacctgttatttatcaatttttcccagtatttttatacggaaaaarttgtattgaaaacacttagtatgcagttgataagaggaatttggtataattatggtgggtgattattttttatactgtatgtgccaaagctttactactgtggaaagacaactgttttaataaaagatttacattccacaacttgaagttcatctatttgatataagacaccttcgggggaaataattcctgtgaatattctttttcaattcagcaaacatttgaaaatctatgatgtgcaagtctaattgttgatttcagtacaagattttctaaatcagttgctacaaaaactgattggtttttgtcacttcatctcttcactaatggagatagcttt

SEQ ID NO: 79 - DNA, 8155 bp, Homo sapiens
ggcggggcggggacagcccggcgggtctctcctcccccgcgccccgggcctccagaggggcgggaggggaccgtcccatataagccccggctcccggcgctcggacgcccgcgccggctgtgctgcacagggggaggagagggaaccccaggcgcgagcgggaagaggggacctgcagccacaacttctctggtcctctgcatcccttctgtccctccacccgtccccttccccaccctctggcccccaccttcttggaggcgacaacccccgggaggcattagaagggatttttcccgcaggttgcgaagggaagcaaacttggtggcaacttgcctcccggtgcgggcgtctctcccccaccgtctcaacatgcttaggggtccggggcccgggctgctgctgctggccgtccwgtgcctggggacagcggtgccctccacgggagcctcgaagagcaagaggcaggctcagcaaatggttcagccccagtccccggtggctgtcagtcaaagcaagcccggttgttatgacaatggaaaacactatcagataaatcaacagtgggagcggacctacctaggcaatgcgttggtttgtacttgttatggaggaagccgaggttttaactgcgagagtaaacctgaagctgaagagacttgctttgacaagtacactgggaacacttaccgagtgggtgacacttatgagcgtcctaaagactccatgatctgggactgtacctgcatyggggctgggcgagggagaataagctgtaccatcgcaaaccgctgccatgaagggggtcagtcctacaagattggtgacacctggaggagaccacatgagactggtggttacatgttagagtgtgtgtgtcttggtaatggaaaaggagaatggacctgcaagcccatagctgagaagtgttttgatcatgctgctgggacttcctatgtggtcggagaaacgtgggagaagccctaccaaggctggatgatggtagattgtacttgcctgggagaaggcagcggacgcatcacttgcacttctagaaatagatgcaacgatcaggacacaaggacatcctatagaattggagacacctggagcaagaaggataatcgaggaaacctgctccagtgcatctgcacaggcaacggccgaggagagtggaagtgtgagaggcacacctctgtgcagaccacatcgagcggatctggccccttcaccgatgttcgtgcagctgtttaccaaccgcagcctcacccccagcctcctccctatggccactgtgtcacagacagtggtgtggtctactctgtggggatgcagtggctgaagacacaaggaaataagcaaatgctttgcacgtgcctgggcaacggagtcagctgccaagagacagctgtaacccagacttacggtggcaactcaaatggagagccatgtgtcttaccattcacctacaatggcaggacgttctactcctgcaccacagaagggcgacaggacggacatctttggtgcagcacaacttcgaattatgagcaggaccagaaatactctttctgcacagaccacactgttttggttcagactcgaggaggaaattccaatggtgccttgtgccacttccccttcctatacaacaaccacaattacactgattgcacttctgagggcagaagagacaacatgaagtggtgtgggaccacacagaactatgatgccgaccagaagtttgggttctgccccatggctgcccacgaggaaatctgcacaaccaatgaaggggtcatgtaccgcattggagatcagtgggataagcagcatgacatgggtcacatgatgaggtgcacgtgtgttgggaatggtcgtggggaatggacatgcattgcctactcgcagcttcgagatcagtgcattgttgatgacatcacttacaatgtgaacgacacattccacaagcgtcatgaagaggggcacatgctgaactgtacatgcttcggtcagggtcggggcaggtggaagtgtgatcccgtcgaccaatgccaggattcagagactgggacgttttatcaaattggagattcatgggagaagtatgtgcatggtgtcagataccagtgctactgctatggccgtggcattggggagtggcattgccaacctttacagacctatccaagctcaagtggtcctgtcgaagtatttatcactgagactccgagtcagcccaactcccaccccatccagtggaatgcaccacagccatctcacatttccaagtacattctcaggtggagacctaaaaattctgtaggccgttggaaggaagctaccataccaggccacttaaactcctacaccatcaaaggcctgaagcctggtgtggtatacgagggccagctcatcagcatccagcagtacggccaccaagaagtgactcgctttgacttcaccaccaccagcaccagcacacctgtgaccagcaacaccgtgacaggagagacgactcccttttctcctcttgtggccacttctgaatctgtgaccgaaatcacagccagtagctttgtggtctcctgggtctcagcttccgacaccgtgtcgggattccgggtggaatatgagctgagtgaggagggagatgagccacagtacctggatcttccaagcacagccacttctgtgaacatccctgacctgcttcctggccgaaaatacattgtaaatgtctatcagatatctgaggatggggagcagagtttgatcctgtctacttcacaaacaacagcgcctgatgccccwcctgacmcgactgtggaccaagttgatgacacctcaattgttgttcgctggagcagaccccaggctcccatcacagggtacagaatagtctattcgccatcagtagaaggtagcagcacagaactcaaccttcctgaaactgcaaactccgtcaccctcagtgacttgcaacctggtgttcagtataacatcactatctatgctgtggaagaaaatcaagaaagtacacctgttgtcattcaacaagaaaccactggcaccccacgctcagatacagtgccctctcccagggacctgcagtttgtggaagtgacagacgtgaaggtcaccatcatgtggacaccgcctgagagtgcagtgaccggctaccgtgtggatgtgatccccgtcaacctgcctggcgagcacgggcagaggctgcccatcagcaggaacacctttgcagaagtcaccgggctgtcccctggggtcacctattacttcaaagtctttgcagtgagccatgggagggagagcaagcctctgactgctcaacagacaaccaaactggatgctcccactaacctccagtttgtcaatgaaactgattctactgtcctggtgagatggactccacctcgggcccagataacaggataccgactgaccgtgggccttacccgaagaggmcagcccaggcagtacaatrtgggtccctctgtctccaagtacccmctgaggaatctgcagcctgcatctgagtacaccgtatccctcgtggccataaagggcaaccaagagagccccaaagccactggagtctttaccacactgcagcctgggagctctattccaccttacaacaccgaggtgactgagaccaccattgtgatcacatggacgcctgctccaagaattggttttaagctgggtgtacgaccaagccagggaggagaggcaccacgagaagtgacttcagactcaggaagcatcgttgtgtccggcttgactccaggagtagaatacgtctacaccatccaagtcctgagagatggacaggaaagagatgcgccaattgtaaacaaagtggtgacaccattgtctccaccaacaaacttgcatctggaggcaaaccctgacactggagtgctcacagtctcctgggagaggagcaccaccccagacattactggttatagaattaccacaacccctacaaacggccagcagggaaattctttggaagaagtggtccatgctgatcagagctcctgcacttttgataacctgagtcccggcctggagtacaatgtcagtgtttacactgtcaaggatgacaaggaaagtgtccctatctctgataccatcatcccagctgttcctcctcccactgacctgcgattcaccaacattggtccagacaccatgcgtgtcacctgggctccacccccatccattgatttaaccaacttcctggtgcgttactcacctgtgaaaaatgaggaagatgttgcagagttgtcaatttctccttcagacaatgcagtggtcttaacaaatctcctgcctggtacagaatatgtagtgagtgtctccagtgtctacgaacaacatgagagcacacctcttagaggaagacagaaaacaggtcttgattccccaactggcattgacttttctgatattactgccaactcttttactgtgcactggattgctcctcgagccaccatcactggctacaggatccgccatcatcccgagcacttcagtgggagacctcgagaagatcgggtgccccactctcggaattccatcaccctcaccaacctcactccaggcacagagtatgtggtcagcatcgttgctcttaatggcagagaggaaagtcccttattgattggccaacaatcaacagtttctgatgttccgagggacctggaagttgttgctgcgacccccaccagcctactgatcagctgggatgctcctgctgtcacagtgagatattacaggatcacttacggagaracaggaggaaatagccctgtccaggagttcactgtgcctgggagcaagtctacagctaccatcagcggccttaaacctggagttgattataccatcactgtgtatgctgtcactggccgtggagacagccccgcaagcagcaagccaatttccattaattaccgaacagaaattgacaaaccatcccagatgcaagtgaccgatgttcaggacaacagcattagtgtcaagtggctgccttcaagttcccctgttactggttacagagtaaccaccactcccaaaaatggaccaggaccaacaaaaactaaaactgcaggtccagatcaaacagaaatgactattgaaggcttgcagcccacagtggagtatgtggttagtgtctatgctcagaatccaagcggagagagtcagcctctggttcagactgcagtaaccactattcctgcaccaactgacctgaagttcactcaggtcacacccacaagcctgagcgcccagtggacaccacccaatgttcagctcactggatatcgagtgcgggtgacccccaaggagaagaccggaccaatgaaagaaatcaaccttgctcctgacagctcatccgtggttgtatcaggacttatggtggccaccaaatatgaagtgagtgtctatgctcttaaggacactttgacaagcagaccagctcagggwgttgtcaccactctggagaatgtcagcccaccaagaagggctcgtgtgacagatgctactgagaccaccatcaccattagctggagaaccaagactgagacgatcactggcttccaagttgatgccgttccagccaatggccagactccaatccagagaaccatcaagccagatgtcagaagctacaccatcacaggtttacaaccaggcactgactacaagatctacctgtacaccttgaatgacaatgctcggagctcccctgtggtcatcgacgcctccactgccattgatgcaccatccaacctgcgtttcctggccaccacacccaattccttgctggtatcatggcagccgccacgtgccaggattaccggctacatcatcaagtatgagaagcctgggtctcctcccagagaagtggtccctcggccccgccctggtgtcacagaggctactattactggcctggaaccgggaaccgaatatacaatttatgtcattgccctgaagaataatcagaagagcgagcccctgattggaaggaaaaagacagacgagcttccccaactggtaacccttccacaccccaatcttcatggaccagagatcttggatgttccttccacagttcaaaagacccctttcgtcacccaccctgggtatgacactggaaatggtattcagcttcctggcacttctggtcagcaacccagtgttgggcaacaaatgatctttgaggaacatggttttaggcggaccacaccgcccacaacggccacccccataaggcataggccaagaccatacccgccgaatgtaggtgaggaaatccaaattggtcacatccccagggaagatgtagactatcacctgtacccacacggtccggkactcaatccaaatgcctctacaggacaagaagctctctctcagacaaccrtctcatgggccccattccaggacacttctgagtacatcatttcatgtcatcctgttggcactgatgaagaacccttacagttcagggttcctggaacttctaccagtgccactctgacaggcctcaccagaggtgccacctacaacrtcatagtggaggcactgaaagaccagcagaggcataaggttcrggaagaggttgttaccgtgggcaactctgtcaacgaaggcttgaaccaacctacggatgactcgtgctttgacccctacacagtttcccattatgccgttggagatgagtgggaacgaatgtctgaatcaggctttaaactgttgtgccagtgcttaggctttggaagtggtcatttcagatgtgattcatctagatggtgccatgacaatggtgtgaactacaagattggagagaagtgggaccgtcagggagaaaatggccagatgatgagctgcacatgtcttgggaacggaaaaggagaattcaagtgtgaccctcatgaggcaacgtgttaygatgatgggaagacataccacgtaggagaacagtggcagaaggaatatctcggtgccatttgctcctgcacatgctttggaggccagcggggctggcgctgtgacaactgccgcagacctgggggtgaacccagtcccgaaggcactactggccagtcctacaaccagtattctcagagataccatcagagaacaaacactaatgttaattgcccaattgagtgcttcatgcctttagatgtacaggctgacagagaagattcccgagagtaaatcatctttccaatccagaggaacaagcatgtctctctgccaagatccatctaaactggagtgatgttagcagacccagcttagagttcttctttctttcttaagccctttgctctggaggaagttctcyagcttcagctcaactcacagcttctccaagcatcaccctgggagtttcctgagggttttctcataaatgagggctgcacattgcctgttctgcttcgaagtattcaataccgctcagtattttaaatgaagtgattctaagatttggtttgggatcaataggaaagcatatgcagccaaccaagatgcaaatgttttgaaatgatatgaccaaaattttaagtaggaaagtcacccaaacacttctgctttcacttaagtgtctggcccgcaatactgtaggaacaagcatgatcttgttactgtgatattttaaatatccacagtactcactttttccaaatgatcctagtaattgcctagaaatatctttctcttacctgttatttatcaatttttcccagtatttttatacggaaaaarttgtattgaaaacacttagtatgcagttgataagaggaatttggtataattatggtgggtgattattttttatactgtatgtgccaaagctttactactgtggaaagacaactgttttaataaaagatttacattccacaacttgaagttcatctatttgatataagacaccttcgggggaaataattcctgtgaatattctttttcaattcagcaaacatttgaaaatctatgatgtgcaagtctaattgttgatttcagtacaagattttctaaatcagttgctacaaaaactgattggtttttgtcacttcatctcttcactaatggagatagcttt

SEQ ID NO: 80 - DNA, 3160 bp, Homo sapiens
agtcccggcctggagtacaatgtcagtgtttacactgtcaaggatgacaaggaaagaggaaatagccctgtccaggagttcactgtgcctgggagcaagtctacagctaccatcagcggccttaaacctggagttgattataccatcactgtgtatgctgtcactggccgtggagacagccccgcaagcagcaagccaatttccattaattaccgaacagaaattgacaaaccatcccagatgcaagtgaccgatgttcaggacaacagcattagtgtcaagtggctgccttcaagttcccctgttactggttacagagtaaccaccactcccaaaaatggaccaggaccaacaaaaactaaaactgcaggtccagatcaaacagaaatgactattgaaggcttgcagcccacagtggagtatgtggttagtgtctatgctcagaatccaagcggagagagtcagcctctggttcagactgcagtaaccactattcctgcaccaactgacctgaagttcactcaggtcacacccacaagcctgagcgcccagtggacaccacccaatgttcagctcactggatatcgagtgcgggtgacccccaaggagaagaccggaccaatgaaagaaatcaaccttgctcctgacagctcatccgtggttgtatcaggacttatggtggccaccaaatatgaagtgagtgtctatgctcttaaggacactttgacaagcagaccagctcagggwgttgtcaccactctggagaatgtcagcccaccaagaagggctcgtgtgacagatgctactgagaccaccatcaccattagctggagaaccaagactgagacgatcactggcttccaagttgatgccgttccagccaatggccagactccaatccagagaaccatcaagccagatgtcagaagctacaccatcacaggtttacaaccaggcactgactacaagatctacctgtacaccttgaatgacaatgctcggagctcccctgtggtcatcgacgcctccactgccattgatgcaccatccaacctgcgtttcctggccaccacacccaattccttgctggtatcatggcagccgccacgtgccaggattaccggctacatcatcaagtatgagaagcctgggtctcctcccagagaagtggtccctcggccccgccctggtgtcacagaggctactattactggcctggaaccgggaaccgaatatacaatttatgtcattgccctgaagaataatcagaagagcgagcccctgattggaaggaaaaagacagttcaaaagacccctttcgtcacccaccctgggtatgacactggaaatggtattcagcttcctggcacttctggtcagcaacccagtgttgggcaacaaatgatctttgaggaacatggttttaggcggaccacaccgcccacaacggccacccccataaggcataggccaagaccatacccgccgaatgtaggacaagaagctctctctcagacaaccrtctcatgggccccattccaggacacttctgagtacatcatttcatgtcatcctgttggcactgatgaagaacccttacagttcagggttcctggaacttctaccagtgccactctgacaggcctcaccagaggtgccacctacaacrtcatagtggaggcactgaaagaccagcagaggcataaggttcrggaagaggttgttaccgtgggcaactctgtcaacgaaggcttgaaccaacctacggatgactcgtgctttgacccctacacagtttcccattatgccgttggagatgagtgggaacgaatgtctgaatcaggctttaaactgttgtgccagtgcttaggctttggaagtggtcatttcagatgtgattcatctagatggtgccatgacaatggtgtgaactacaagattggagagaagtgggaccgtcagggagaaaatggccagatgatgagctgcacatgtcttgggaacggaaaaggagaattcaagtgtgaccctcatgaggcaacgtgttaygatgatgggaagacataccacgtaggagaacagtggcagaaggaatatctcggtgccatttgctcctgcacatgctttggaggccagcggggctggcgctgtgacaactgccgcagacctgggggtgaacccagtcccgaaggcactactggccagtcctacaaccagtattctcagagataccatcagagaacaaacactaatgttaattgcccaattgagtgcttcatgcctttagatgtacaggctgacagagaagattcccgagagtaaatcatctttccaatccagaggaacaagcatgtctctctgccaagatccatctaaactggagtgatgttagcagacccagcttagagttcttctttctttcttaagccctttgctctggaggaagttctcyagcttcagctcaactcacagcttctccaagcatcaccctgggagtttcctgagggttttctcataaatgagggctgcacattgcctgttctgcttcgaagtattcaataccgctcagtattttaaatgaagtgattctaagatttggtttgggatcaataggaaagcatatgcagccaaccaagatgcaaatgttttgaaatgattgtctggcccgcaatactgtaggaacaagcatgatcttgttactgtgatattttaaatatccacagtactcactttttccaaatgatcctagtaattgcctagaaatatctttctcttacctgttatttatcaatttttcccagtatttttatacggaaaaarttgtattgaaaacacttagtatgcagttgataagaggaatttggtataattatggtgggtgattattttttatactgtatgtgccaaagctttactactgtggaaagacaactgttttaataaaagatttacattccacaacttgaagttcatctatttgatataagacaccttcgggggaaataattcctgtgaatattctttttcaattcagcaaacatttgaaaatctatgatgtgcaagtctaattgttgatttcagtacaagattttctaaatcagttgctacaaaaactgattggtttttgtcacttcatctcttcactaatggagatagcttt

SEQ ID NO: 81 - DNA, 7959 bp, Homo sapiens
ggcggggcggggacagcccggcgggtctctcctcccccgcgccccgggcctccagaggggcgggaggggaccgtcccatataagccccggctcccggcgctcggacgcccgcgccggctgtgctgcacagggggaggagagggaaccccaggcgcgagcgggaagaggggacctgcagccacaacttctctggtcctctgcatcccttctgtccctccacccgtccccttccccaccctctggcccccaccttcttggaggcgacaacccccgggaggcattagaagggatttttcccgcaggttgcgaagggaagcaaacttggtggcaacttgcctcccggtgcgggcgtctctcccccaccgtctcaacatgcttaggggtccggggcccgggctgctgctgctggccgtccwgtgcctggggacagcggtgccctccacgggagcctcgaagagcaagaggcaggctcagcaaatggttcagccccagtccccggtggctgtcagtcaaagcaagcccggttgttatgacaatggaaaacactatcagataaatcaacagtgggagcggacctacctaggcaatgcgttggtttgtacttgttatggaggaagccgaggttttaactgcgagagtaaacctgaagctgaagagacttgctttgacaagtacactgggaacacttaccgagtgggtgacacttatgagcgtcctaaagactccatgatctgggactgtacctgcatyggggctgggcgagggagaataagctgtaccatcgcaaaccgctgccatgaagggggtcagtcctacaagattggtgacacctggaggagaccacatgagactggtggttacatgttagagtgtgtgtgtcttggtaatggaaaaggagaatggacctgcaagcccatagctgagaagtgttttgatcatgctgctgggacttcctatgtggtcggagaaacgtgggagaagccctaccaaggctggatgatggtagattgtacttgcctgggagaaggcagcggacgcatcacttgcacttctagaaatagatgcaacgatcaggacacaaggacatcctatagaattggagacacctggagcaagaaggataatcgaggaaacctgctccagtgcatctgcacaggcaacggccgaggagagtggaagtgtgagaggcacacctctgtgcagaccacatcgagcggatctggccccttcaccgatgttcgtgcagctgtttaccaaccgcagcctcacccccagcctcctccctatggccactgtgtcacagacagtggtgtggtctactctgtggggatgcagtggctgaagacacaaggaaataagcaaatgctttgcacgtgcctgggcaacggagtcagctgccaagagacagctgtaacccagacttacggtggcaactcaaatggagagccatgtgtcttaccattcacctacaatggcaggacgttctactcctgcaccacagaagggcgacaggacggacatctttggtgcagcacaacttcgaattatgagcaggaccagaaatactctttctgcacagaccacactgttttggttcagactcgaggaggaaattccaatggtgccttgtgccacttccccttcctatacaacaaccacaattacactgattgcacttctgagggcagaagagacaacatgaagtggtgtgggaccacacagaactatgatgccgaccagaagtttgggttctgccccatggctgcccacgaggaaatctgcacaaccaatgaaggggtcatgtaccgcattggagatcagtgggataagcagcatgacatgggtcacatgatgaggtgcacgtgtgttgggaatggtcgtggggaatggacatgcattgcctactcgcagcttcgagatcagtgcattgttgatgacatcacttacaatgtgaacgacacattccacaagcgtcatgaagaggggcacatgctgaactgtacatgcttcggtcagggtcggggcaggtggaagtgtgatcccgtcgaccaatgccaggattcagagactgggacgttttatcaaattggagattcatgggagaagtatgtgcatggtgtcagataccagtgctactgctatggccgtggcattggggagtggcattgccaacctttacagacctatccaagctcaagtggtcctgtcgaagtatttatcactgagactccgagtcagcccaactcccaccccatccagtggaatgcaccacagccatctcacatttccaagtacattctcaggtggagacctaaaaattctgtaggccgttggaaggaagctaccataccaggccacttaaactcctacaccatcaaaggcctgaagcctggtgtggtatacgagggccagctcatcagcatccagcagtacggccaccaagaagtgactcgctttgacttcaccaccaccagcaccagcacacctgtgaccagtatgtacacaaccaccctcatgcctcctacccccgaggttcctagagctaggctctcctgaggcaatgctttccttctcaattcatattcttccaggaggggcaccaacgttttttaaaatgatgttggcgacgaggacggtaaattttctagatgactgaaggctgactttcccctttctgtgactctctaggcaacaccgtgacaggagagacgactcccttttctcctcttgtggccacttctgaatctgtgaccgaaatcacagccagtagctttgtggtctcctgggtctcagcttccgacaccgtgtcgggattccgggtggaatatgagctgagtgaggagggagatgagccacagtacctggatcttccaagcacagccacttctgtgaacatccctgacctgcttcctggccgaaaatacattgtaaatgtctatcagatatctgaggatggggagcagagtttgatcctgtctacttcacaaacaacagcgcctgatgccccwcctgacmcgactgtggaccaagttgatgacacctcaattgttgttcgctggagcagaccccaggctcccatcacagggtacagaatagtctattcgccatcagtagaaggtagcagcacagaactcaaccttcctgaaactgcaaactccgtcaccctcagtgacttgcaacctggtgttcagtataacatcactatctatgctgtggaagaaaatcaagaaagtacacctgttgtcattcaacaagaaaccactggcaccccacgctcagatacagtgccctctcccagggacctgcagtttgtggaagtgacagacgtgaaggtcaccatcatgtggacaccgcctgagagtgcagtgaccggctaccgtgtggatgtgatccccgtcaacctgcctggcgagcacgggcagaggctgcccatcagcaggaacacctttgcagaagtcaccgggctgtcccctggggtcacctattacttcaaagtctttgcagtgagccatgggagggagagcaagcctctgactgctcaacagacaaccaaactggatgctcccactaacctccagtttgtcaatgaaactgattctactgtcctggtgagatggactccacctcgggcccagataacaggataccgactgaccgtgggccttacccgaagaggmcagcccaggcagtacaatrtgggtccctctgtctccaagtacccmctgaggaatctgcagcctgcatctgagtacaccgtatccctcgtggccataaagggcaaccaagagagccccaaagccactggagtctttaccacactgcagcctgggagctctattccaccttacaacaccgaggtgactgagaccaccattgtgatcacatggacgcctgctccaagaattggttttaagctgggtgtacgaccaagccagggaggagaggcaccacgagaagtgacttcagactcaggaagcatcgttgtgtccggcttgactccaggagtagaatacgtctacaccatccaagtcctgagagatggacaggaaagagatgcgccaattgtaaacaaagtggtgacaccattgtctccaccaacaaacttgcatctggaggcaaaccctgacactggagtgctcacagtctcctgggagaggagcaccaccccagacattactggttatagaattaccacaacccctacaaacggccagcagggaaattctttggaagaagtggtccatgctgatcagagctcctgcacttttgataacctgagtcccggcctggagtacaatgtcagtgtttacactgtcaaggatgacaaggaaagtgtccctatctctgataccatcatcccagctgttcctcctcccactgacctgcgattcaccaacattggtccagacaccatgcgtgtcacctgggctccacccccatccattgatttaaccaacttcctggtgcgttactcacctgtgaaaaatgaggaagatgttgcagagttgtcaatttctccttcagacaatgcagtggtcttaacaaatctcctgcctggtacagaatatgtagtgagtgtctccagtgtctacgaacaacatgagagcacacctcttagaggaagacagaaaacaggtcttgattccccaactggcattgacttttctgatattactgccaactcttttactgtgcactggattgctcctcgagccaccatcactggctacaggatccgccatcatcccgagcacttcagtgggagacctcgagaagatcgggtgccccactctcggaattccatcaccctcaccaacctcactccaggcacagagtatgtggtcagcatcgttgctcttaatggcagagaggaaagtcccttattgattggccaacaatcaacagtttctgatgttccgagggacctggaagttgttgctgcgacccccaccagcctactgatcagctgggatgctcctgctgtcacagtgagatattacaggatcacttacggagaracaggaggaaatagccctgtccaggagttcactgtgcctgggagcaagtctacagctaccatcagcggccttaaacctggagttgattataccatcactgtgtatgctgtcactggccgtggagacagccccgcaagcagcaagccaatttccattaattaccgaacagaaattgacaaaccatcccagatgcaagtgaccgatgttcaggacaacagcattagtgtcaagtggctgccttcaagttcccctgttactggttacagagtaaccaccactcccaaaaatggaccaggaccaacaaaaactaaaactgcaggtccagatcaaacagaaatgactattgaaggcttgcagcccacagtggagtatgtggttagtgtctatgctcagaatccaagcggagagagtcagcctctggttcagactgcagtaaccaacattgatcgccctaaaggactggcattcactgatgtggatgtcgattccatcaaaattgcttgggaaagcccacaggggcaagtttccaggtacagggtgacctactckagccctgaggatggaatccatgagctattccctgcacctgatggtgaagaagacactgcagagctgcaaggcctcagaccgggttctgagtacacagtcagtgtggttgccttgcacgatgatatggagagccagcccctgattggaacccagtccacagctattcctgcaccaactgacctgaagttcactcaggtcacacccacaagcctgagcgcccagtggacaccacccaatgttcagctcactggatatcgagtgcgggtgacccccaaggagaagaccggaccaatgaaagaaatcaaccttgctcctgacagctcatccgtggttgtatcaggacttatggtggccaccaaatatgaagtgagtgtctatgctcttaaggacactttgacaagcagaccagctcagggwgttgtcaccactctggagaatgtcagcccaccaagaagggctcgtgtgacagatgctactgagaccaccatcaccattagctggagaaccaagactgagacgatcactggcttccaagttgatgccgttccagccaatggccagactccaatccagagaaccatcaagccagatgtcagaagctacaccatcacaggtttacaaccaggcactgactacaagatctacctgtacaccttgaatgacaatgctcggagctcccctgtggtcatcgacgcctccactgccattgatgcaccatccaacctgcgtttcctggccaccacacccaattccttgctggtatcatggcagccgccacgtgccaggattaccggctacatcatcaagtatgagaagcctgggtctcctcccagagaagtggtccctcggccccgccctggtgtcacagaggctactattactggcctggaaccgggaaccgaatatacaatttatgtcattgccctgaagaataatcagaagagcgagcccctgattggaaggaaaaagacagtcaacgaaggcttgaaccaacctacggatgactcgtgctttgacccctacacagtttcccattatgccgttggagatgagtgggaacgaatgtctgaatcaggctttaaactgttgtgccagtgcttaggctttggaagtggtcatttcagatgtgattcatctagatggtgccatgacaatggtgtgaactacaagattggagagaagtgggaccgtcagggagaaaatggccagatgatgagctgcacatgtcttgggaacggaaaaggagaattcaagtgtgaccctcatgaggcaacgtgttaygatgatgggaagacataccacgtaggagaacagtggcagaaggaatatctcggtgccatttgctcctgcacatgctttggaggccagcggggctggcgctgtgacaactgccgcagacctgggggtgaacccagtcccgaaggcactactggccagtcctacaaccagtattctcagagataccatcagagaacaaacactaatgttaattgcccaattgagtgcttcatgcctttagatgtacaggctgacagagaagattcccgagagtaaatcatctttccaatccagaggaacaagcatgtctctctgccaagatccatctaaactggagtgatgttagcagacccagcttagagttcttctttctttcttaagccctttgctctggaggaagttctcyagcttcagctcaactcacagcttctccaagcatcaccctgggagtttcctgagggttttctcataaatgagggctgcacattgcctgttctgcttcgaagtattcaataccgctcagtattttaaatgaagtgattctaagatttggtttgggatcaataggaaagcatatgcagccaaccaagatgcaaatgttttgaaatgattgtctggcccgcaatactgtaggaacaagcatgatcttgttactgtgatattttaaatatccacagtactcactttttccaaatgatcctagtaattgcctagaaatatctttctcttacctgttatttatcaatttttcccagtatttttatacggaaaaarttgtattgaaaacacttagtatgcagttgataagaggaatttggtataattatggtgggtgattattttttatactgtatgtgccaaagctttactactgtggaaagacaactgttttaataaaagatttacattccacaacttgaagttcatctatttgatataagacaccttcgggggaaataattcctgtgaatattctttttcaattcagcaaacatttgaaaatctatgatgtgcaagtctaattgttgatttcagtacaagattttctaaatcagttgctacaaaaactgattggtttttgtcacttcatctcttcactaatggagatagcttt

SEQ ID NO: 82 - DNA, 8278 bp, Homo sapiens
ggcggggcggggacagcccggcgggtctctcctcccccgcgccccgggcctccagaggggcgggaggggaccgtcccatataagccccggctcccggcgctcggacgcccgcgccggctgtgctgcacagggggaggagagggaaccccaggcgcgagcgggaagaggggacctgcagccacaacttctctggtcctctgcatcccttctgtccctccacccgtccccttccccaccctctggcccccaccttcttggaggcgacaacccccgggaggcattagaagggatttttcccgcaggttgcgaagggaagcaaacttggtggcaacttgcctcccggtgcgggcgtctctcccccaccgtctcaacatgcttaggggtccggggcccgggctgctgctgctggccgtccwgtgcctggggacagcggtgccctccacgggagcctcgaagagcaagaggcaggctcagcaaatggttcagccccagtccccggtggctgtcagtcaaagcaagcccggttgttatgacaatggaaaacactatcagataaatcaacagtgggagcggacctacctaggcaatgcgttggtttgtacttgttatggaggaagccgaggttttaactgcgagagtaaacctgaagctgaagagacttgctttgacaagtacactgggaacacttaccgagtgggtgacacttatgagcgtcctaaagactccatgatctgggactgtacctgcatyggggctgggcgagggagaataagctgtaccatcgcaaaccgctgccatgaagggggtcagtcctacaagattggtgacacctggaggagaccacatgagactggtggttacatgttagagtgtgtgtgtcttggtaatggaaaaggagaatggacctgcaagcccatagctgagaagtgttttgatcatgctgctgggacttcctatgtggtcggagaaacgtgggagaagccctaccaaggctggatgatggtagattgtacttgcctgggagaaggcagcggacgcatcacttgcacttctagaaatagatgcaacgatcaggacacaaggacatcctatagaattggagacacctggagcaagaaggataatcgaggaaacctgctccagtgcatctgcacaggcaacggccgaggagagtggaagtgtgagaggcacacctctgtgcagaccacatcgagcggatctggccccttcaccgatgttcgtgcagctgtttaccaaccgcagcctcacccccagcctcctccctatggccactgtgtcacagacagtggtgtggtctactctgtggggatgcagtggctgaagacacaaggaaataagcaaatgctttgcacgtgcctgggcaacggagtcagctgccaagagacagctgtaacccagacttacggtggcaactcaaatggagagccatgtgtcttaccattcacctacaatggcaggacgttctactcctgcaccacagaagggcgacaggacggacatctttggtgcagcacaacttcgaattatgagcaggaccagaaatactctttctgcacagaccacactgttttggttcagactcgaggaggaaattccaatggtgccttgtgccacttccccttcctatacaacaaccacaattacactgattgcacttctgagggcagaagagacaacatgaagtggtgtgggaccacacagaactatgatgccgaccagaagtttgggttctgccccatggctgcccacgaggaaatctgcacaaccaatgaaggggtcatgtaccgcattggagatcagtgggataagcagcatgacatgggtcacatgatgaggtgcacgtgtgttgggaatggtcgtggggaatggacatgcattgcctactcgcagcttcgagatcagtgcattgttgatgacatcacttacaatgtgaacgacacattccacaagcgtcatgaagaggggcacatgctgaactgtacatgcttcggtcagggtcggggcaggtggaagtgtgatcccgtcgaccaatgccaggattcagagactgggacgttttatcaaattggagattcatgggagaagtatgtgcatggtgtcagataccagtgctactgctatggccgtggcattggggagtggcattgccaacctttacagacctatccaagctcaagtggtcctgtcgaagtatttatcactgagactccgagtcagcccaactcccaccccatccagtggaatgcaccacagccatctcacatttccaagtacattctcaggtggagacctaaaaattctgtaggccgttggaaggaagctaccataccaggccacttaaactcctacaccatcaaaggcctgaagcctggtgtggtatacgagggccagctcatcagcatccagcagtacggccaccaagaagtgactcgctttgacttcaccaccaccagcaccagcacacctgtgaccagcaacaccgtgacaggagagacgactcccttttctcctcttgtggccacttctgaatctgtgaccgaaatcacagccagtagctttgtggtctcctgggtctcagcttccgacaccgtgtcgggattccgggtggaatatgagctgagtgaggagggagatgagccacagtacctggatcttccaagcacagccacttctgtgaacatccctgacctgcttcctggccgaaaatacattgtaaatgtctatcagatatctgaggatggggagcagagtttgatcctgtctacttcacaaacaacagcgcctgatgccccwcctgacmcgactgtggaccaagttgatgacacctcaattgttgttcgctggagcagaccccaggctcccatcacagggtacagaatagtctattcgccatcagtagaaggtagcagcacagaactcaaccttcctgaaactgcaaactccgtcaccctcagtgacttgcaacctggtgttcagtataacatcactatctatgctgtggaagaaaatcaagaaagtacacctgttgtcattcaacaagaaaccactggcaccccacgctcagatacagtgccctctcccagggacctgcagtttgtggaagtgacagacgtgaaggtcaccatcatgtggacaccgcctgagagtgcagtgaccggctaccgtgtggatgtgatccccgtcaacctgcctggcgagcacgggcagaggctgcccatcagcaggaacacctttgcagaagtcaccgggctgtcccctggggtcacctattacttcaaagtctttgcagtgagccatgggagggagagcaagcctctgactgctcaacagacaaccaaactggatgctcccactaacctccagtttgtcaatgaaactgattctactgtcctggtgagatggactccacctcgggcccagataacaggataccgactgaccgtgggccttacccgaagaggmcagcccaggcagtacaatrtgggtccctctgtctccaagtacccmctgaggaatctgcagcctgcatctgagtacaccgtatccctcgtggccataaagggcaaccaagagagccccaaagccactggagtctttaccacactgcagcctgggagctctattccaccttacaacaccgaggtgactgagaccaccattgtgatcacatggacgcctgctccaagaattggttttaagctgggtgtacgaccaagccagggaggagaggcaccacgagaagtgacttcagactcaggaagcatcgttgtgtccggcttgactccaggagtagaatacgtctacaccatccaagtcctgagagatggacaggaaagagatgcgccaattgtaaacaaagtggtgacaccattgtctccaccaacaaacttgcatctggaggcaaaccctgacactggagtgctcacagtctcctgggagaggagcaccaccccagacattactggttatagaattaccacaacccctacaaacggccagcagggaaattctttggaagaagtggtccatgctgatcagagctcctgcacttttgataacctgagtcccggcctggagtacaatgtcagtgtttacactgtcaaggatgacaaggaaagtgtccctatctctgataccatcatcccagctgttcctcctcccactgacctgcgattcaccaacattggtccagacaccatgcgtgtcacctgggctccacccccatccattgatttaaccaacttcctggtgcgttactcacctgtgaaaaatgaggaagatgttgcagagttgtcaatttctccttcagacaatgcagtggtcttaacaaatctcctgcctggtacagaatatgtagtgagtgtctccagtgtctacgaacaacatgagagcacacctcttagaggaagacagaaaacaggtcttgattccccaactggcattgacttttctgatattactgccaactcttttactgtgcactggattgctcctcgagccaccatcactggctacaggatccgccatcatcccgagcacttcagtgggagacctcgagaagatcgggtgccccactctcggaattccatcaccctcaccaacctcactccaggcacagagtatgtggtcagcatcgttgctcttaatggcagagaggaaagtcccttattgattggccaacaatcaacagtttctgatgttccgagggacctggaagttgttgctgcgacccccaccagcctactgatcagctgggatgctcctgctgtcacagtgagatattacaggatcacttacggagaracaggaggaaatagccctgtccaggagttcactgtgcctgggagcaagtctacagctaccatcagcggccttaaacctggagttgattataccatcactgtgtatgctgtcactggccgtggagacagccccgcaagcagcaagccaatttccattaattaccgaacagaaattgacaaaccatcccagatgcaagtgaccgatgttcaggacaacagcattagtgtcaagtggctgccttcaagttcccctgttactggttacagagtaaccaccactcccaaaaatggaccaggaccaacaaaaactaaaactgcaggtccagatcaaacagaaatgactattgaaggcttgcagcccacagtggagtatgtggttagtgtctatgctcagaatccaagcggagagagtcagcctctggttcagactgcagtaaccaacattgatcgccctaaaggactggcattcactgatgtggatgtcgattccatcaaaattgcttgggaaagcccacaggggcaagtttccaggtacagggtgacctactckagccctgaggatggaatccatgagctattccctgcacctgatggtgaagaagacactgcagagctgcaaggcctcagaccgggttctgagtacacagtcagtgtggttgccttgcacgatgatatggagagccagcccctgattggaacccagtccacagctattcctgcaccaactgacctgaagttcactcaggtcacacccacaagcctgagcgcccagtggacaccacccaatgttcagctcactggatatcgagtgcgggtgacccccaaggagaagaccggaccaatgaaagaaatcaaccttgctcctgacagctcatccgtggttgtatcaggacttatggtggccaccaaatatgaagtgagtgtctatgctcttaaggacactttgacaagcagaccagctcagggwgttgtcaccactctggagaatgtcagcccaccaagaagggctcgtgtgacagatgctactgagaccaccatcaccattagctggagaaccaagactgagacgatcactggcttccaagttgatgccgttccagccaatggccagactccaatccagagaaccatcaagccagatgtcagaagctacaccatcacaggtttacaaccaggcactgactacaagatctacctgtacaccttgaatgacaatgctcggagctcccctgtggtcatcgacgcctccactgccattgatgcaccatccaacctgcgtttcctggccaccacacccaattccttgctggtatcatggcagccgccacgtgccaggattaccggctacatcatcaagtatgagaagcctgggtctcctcccagagaagtggtccctcggccccgccctggtgtcacagaggctactattactggcctggaaccgggaaccgaatatacaatttatgtcattgccctgaagaataatcagaagagcgagcccctgattggaaggaaaaagacagacgagcttccccaactggtaacccttccacaccccaatcttcatggaccagagatcttggatgttccttccacagttcaaaagacccctttcgtcacccaccctgggtatgacactggaaatggtattcagcttcctggcacttctggtcagcaacccagtgttgggcaacaaatgatctttgaggaacatggttttaggcggaccacaccgcccacaacggccacccccataaggcataggccaagaccatacccgccgaatgtaggacaagaagctctctctcagacaaccrtctcatgggccccattccaggacacttctgagtacatcatttcatgtcatcctgttggcactgatgaagaacccttacagttcagggttcctggaacttctaccagtgccactctgacaggcctcaccagaggtgccacctacaacrtcatagtggaggcactgaaagaccagcagaggcataaggttcrggaagaggttgttaccgtgggcaactctgtcaacgaaggcttgaaccaacctacggatgactcgtgctttgacccctacacagtttcccattatgccgttggagatgagtgggaacgaatgtctgaatcaggctttaaactgttgtgccagtgcttaggctttggaagtggtcatttcagatgtgattcatctagatggtgccatgacaatggtgtgaactacaagattggagagaagtgggaccgtcagggagaaaatggccagatgatgagctgcacatgtcttgggaacggaaaaggagaattcaagtgtgaccctcatgaggcaacgtgttaygatgatgggaagacataccacgtaggagaacagtggcagaaggaatatctcggtgccatttgctcctgcacatgctttggaggccagcggggctggcgctgtgacaactgccgcagacctgggggtgaacccagtcccgaaggcactactggccagtcctacaaccagtattctcagagataccatcagagaacaaacactaatgttaattgcccaattgagtgcttcatgcctttagatgtacaggctgacagagaagattcccgagagtaaatcatctttccaatccagaggaacaagcatgtctctctgccaagatccatctaaactggagtgatgttagcagacccagcttagagttcttctttctttcttaagccctttgctctggaggaagttctcyagcttcagctcaactcacagcttctccaagcatcaccctgggagtttcctgagggttttctcataaatgagggctgcacattgcctgttctgcttcgaagtattcaataccgctcagtattttaaatgaagtgattctaagatttggtttgggatcaataggaaagcatatgcagccaaccaagatgcaaatgttttgaaatgattgtctggcccgcaatactgtaggaacaagcatgatcttgttactgtgatattttaaatatccacagtactcactttttccaaatgatcctagtaattgcctagaaatatctttctcttacctgttatttatcaatttttcccagtatttttatacggaaaaarttgtattgaaaacacttagtatgcagttgataagaggaatttggtataattatggtgggtgattattttttatactgtatgtgccaaagctttactactgtggaaagacaactgttttaataaaagatttacattccacaacttgaagttcatctatttgatataagacaccttcgggggaaataattcctgtgaatattctttttcaattcagcaaacatttgaaaatctatgatgtgcaagtctaattgttgatttcagtacaagattttctaaatcagttgctacaaaaactgattggtttttgtcacttcatctcttcactaatggagatagcttt

SEQ ID NO: 83 - DNA, 3101 bp, Homo sapiens
actcgtctctggtaaagtctgagcaggacagggtggctgactggcagatccagaggttcccttggcagtccacgccaggccttcaccatggatcagttccctgaatcagtgacagaaaactttgagtacgatgatttggctgaggcctgttatattggggacatcgtggtctttgggactgtgttcctgtccatattctactccgtcatctttgccattggcctggtgggaaatttgttggtagtgtttgccctcaccaacagcaagaagcccaagagtgtcaccgacatttacctcctgaacctggccttgtctgatctgctgtttgtagccactttgcccttctggactcactatttgataaatgaaaagggcctccacaatgccatgtgcaaattcactaccgccttcttcttcatcggcttttttggaagcatattcttcatcaccgtcatcagcattgataggtacctggccatcgtcctggccgccaactccatgaacaaccggaccgtgcagcatggcrtcaccatcagcctaggcgtctgggcagcagccattttggtggcagcaccccagttcatgttcacaaagcagaaagaaaatgaatgccttggtgactaccccgaggtcctccaggaaatctggcccgtgctccgcaatgtggaaacaaattttcttggcttcctactccccctgctcattatgagttattgctacttcagartcatccagacgctgttytcctgcaagaaccacaagaaagccaaagccattaaactgatccttctggtggtcatcgtgtttttcctcttctggacaccctacaacrttatgattttcctggagacgcttaagctctatgacttctttcccagttgtgacatgaggaaggatctgaggctggccctcagtgtgactgagayggttgcatttagccattgttgcctgaatcctctcatctatgcatttgctggggagaagttcagaagatacctttaccacctgtatgggaaatgcctggctgtcctgtgtgggcgctcagtccacgttgatttctcctcatctgaatcacaaaggagcaggcatggaagtgttctgagcagcaattttacttaccacacgagtgatggagatgcaytgctccttctctgaagggaatcccaaagccttgtgtctacagagaacctggagttcctgaacctgatgctgactagtgaggaaagatttttgttgttatttcttacaggcacaaaatgatggacccaatgcacacaaaacaaccctagagtgttgttgagaaytgtgctcaaaatttgaagaatgaacaaattgaactctttgaatgacaaagagtagacatttctcttactgcaaatgtcatcagaactttttggtttgcagatgacaaaaattcaactcagactagtttagttaaatgagggtggtgaatattgttcatattgtggcacaagcaaaaggrtgtctgagccctcaaagtgaggggaaaccagggcctgagccaagctagaattccctctctctgactctcaaatcttttagtcattatagatcccccagactttacatgacacagctttatcaccagagagggactgacacccatgtttctctggccccaagggcaaaattcccagggaagtgctctgataggccaagtttgtatcaggtgcccatccctggaaggtgctgttatccatggggaagggatatataagatggaagcttccagtccaatctcatggagaagcagaaatacatatttccaagaagttggatgggtgggtactattctgattacacaaaacaaatgccacacatcacccttaccatgtgcctgatccagcytctcccctgattacaccagcctcgtcttcattaagccctcttccatcatgtccccaaacctgcaagggctccccactgcctactgcatcgagtcaaaactcaaatgcttggcttctcatacgtccaccatggggtcctaccaatagattccccattgcctcctccttcccaaaggactccacccatcctatcagcctgtctcttccatatgacctcatgcatctccacctgctcccaggccagtaagggaaatagaaaaaccctgcccccaaataagaagggatggattccaaccccaactccagtagcttgggacaaatcaagcttcagtttcctggtctgtagaagagggataaggtacctttcacatagagatcatcctttccagcatgaggaactagccaccaactcttgcaggtctcaacccttttgtctgcctcttagacttctgctttccacacctggcactgctgtgctgtgcccaagttgtggtgctgacaaagcttggaagagcctgcaggtgctgctgcgtggcatagcccagacacagaagaggctggttcttacgatggcacccagtgagcactcccaagtctacagagtgatagccttccgtaacccaactctcctggactgccttgaatatcccctcccagtcaccttgtggcaagcccctgcccatctgggaaaataccccatcattcatgctactgccaacctggggagccagggctatgggagcagcttttttttcccccctagaaacgtttggaacaatctaaaactttaaagctcgaaaacaattgtaataatgctaaagaaaaagtcatccaatctaaccacatcaatattgtcattcctgtattcacccgtccagaccttgttcacactctcacatgtttagagttgcaatcgtaatgtacagatggttttataatctgatttgttttcctcttaacgttagaccacaaatagtgctcgctttctatgtagtttggtaattatcattttagaagactctaccagactgtgtattcattgaagtcagatgtggtaactgttaaattgctgtgtatctgatagctctttggcagtctatatgtttgtataatgaatgagagaataagtcatgttccttcaagatcatgtaccccaatttacttgccattactcaattgataaacatttaacttgtttccaatgtttagcaaatacatattttatagaacttc

SEQ ID NO: 84 - DNA, 3062 bp, Homo sapiens
aagagctctctggcttctgggtggagaatggccagtggggccttcaccatggatcagttccctgaatcagtgacagaaaactttgagtacgatgatttggctgaggcctgttatattggggacatcgtggtctttgggactgtgttcctgtccatattctactccgtcatctttgccattggcctggtgggaaatttgttggtagtgtttgccctcaccaacagcaagaagcccaagagtgtcaccgacatttacctcctgaacctggccttgtctgatctgctgtttgtagccactttgcccttctggactcactatttgataaatgaaaagggcctccacaatgccatgtgcaaattcactaccgccttcttcttcatcggcttttttggaagcatattcttcatcaccgtcatcagcattgataggtacctggccatcgtcctggccgccaactccatgaacaaccggaccgtgcagcatggcrtcaccatcagcctaggcgtctgggcagcagccattttggtggcagcaccccagttcatgttcacaaagcagaaagaaaatgaatgccttggtgactaccccgaggtcctccaggaaatctggcccgtgctccgcaatgtggaaacaaattttcttggcttcctactccccctgctcattatgagttattgctacttcagartcatccagacgctgttytcctgcaagaaccacaagaaagccaaagccattaaactgatccttctggtggtcatcgtgtttttcctcttctggacaccctacaacrttatgattttcctggagacgcttaagctctatgacttctttcccagttgtgacatgaggaaggatctgaggctggccctcagtgtgactgagayggttgcatttagccattgttgcctgaatcctctcatctatgcatttgctggggagaagttcagaagatacctttaccacctgtatgggaaatgcctggctgtcctgtgtgggcgctcagtccacgttgatttctcctcatctgaatcacaaaggagcaggcatggaagtgttctgagcagcaattttacttaccacacgagtgatggagatgcaytgctccttctctgaagggaatcccaaagccttgtgtctacagagaacctggagttcctgaacctgatgctgactagtgaggaaagatttttgttgttatttcttacaggcacaaaatgatggacccaatgcacacaaaacaaccctagagtgttgttgagaaytgtgctcaaaatttgaagaatgaacaaattgaactctttgaatgacaaagagtagacatttctcttactgcaaatgtcatcagaactttttggtttgcagatgacaaaaattcaactcagactagtttagttaaatgagggtggtgaatattgttcatattgtggcacaagcaaaaggrtgtctgagccctcaaagtgaggggaaaccagggcctgagccaagctagaattccctctctctgactctcaaatcttttagtcattatagatcccccagactttacatgacacagctttatcaccagagagggactgacacccatgtttctctggccccaagggcaaaattcccagggaagtgctctgataggccaagtttgtatcaggtgcccatccctggaaggtgctgttatccatggggaagggatatataagatggaagcttccagtccaatctcatggagaagcagaaatacatatttccaagaagttggatgggtgggtactattctgattacacaaaacaaatgccacacatcacccttaccatgtgcctgatccagcytctcccctgattacaccagcctcgtcttcattaagccctcttccatcatgtccccaaacctgcaagggctccccactgcctactgcatcgagtcaaaactcaaatgcttggcttctcatacgtccaccatggggtcctaccaatagattccccattgcctcctccttcccaaaggactccacccatcctatcagcctgtctcttccatatgacctcatgcatctccacctgctcccaggccagtaagggaaatagaaaaaccctgcccccaaataagaagggatggattccaaccccaactccagtagcttgggacaaatcaagcttcagtttcctggtctgtagaagagggataaggtacctttcacatagagatcatcctttccagcatgaggaactagccaccaactcttgcaggtctcaacccttttgtctgcctcttagacttctgctttccacacctggcactgctgtgctgtgcccaagttgtggtgctgacaaagcttggaagagcctgcaggtgctgctgcgtggcatagcccagacacagaagaggctggttcttacgatggcacccagtgagcactcccaagtctacagagtgatagccttccgtaacccaactctcctggactgccttgaatatcccctcccagtcaccttgtggcaagcccctgcccatctgggaaaataccccatcattcatgctactgccaacctggggagccagggctatgggagcagcttttttttcccccctagaaacgtttggaacaatctaaaactttaaagctcgaaaacaattgtaataatgctaaagaaaaagtcatccaatctaaccacatcaatattgtcattcctgtattcacccgtccagaccttgttcacactctcacatgtttagagttgcaatcgtaatgtacagatggttttataatctgatttgttttcctcttaacgttagaccacaaatagtgctcgctttctatgtagtttggtaattatcattttagaagactctaccagactgtgtattcattgaagtcagatgtggtaactgttaaattgctgtgtatctgatagctctttggcagtctatatgtttgtataatgaatgagagaataagtcatgttccttcaagatcatgtaccccaatttacttgccattactcaattgataaacatttaacttgtttccaatgtttagcaaatacatattttatagaacttc

SEQ ID NO: 85 - DNA, 5025 bp, Homo sapiens
acatcagaatggtagataattcctgttccactttctttgatgaaacaagtaaagaagaaacaacacaatcatattaatagaagagtcttygttccagacgcagtccaggaatcatgctggagaagttctgcaactctactttttggaattcctcattcctggacagtccggaggcagacctgccactttgttttgagcaaactgttctggtgtggattcccttgggctwcctatggctcctggccccctggcagcttctccacgtgtataartccaggaccaagagatcctctaccaccaaactctatcttgctaagcaggtattcgttggttttcttcttattctagcagccatagagctggcccttgtactcacagaagactctggacaagccacagtccctgctgttcgatataccaatccaagcctctacctaggcacatggctcctggttttgctgatccaatacagcagacaatggtgtgtacagaaaaactcctggttcctgtccctattctggattctctcgatactctgtggcactttccaatttcagactctgatccggacactcttacagggtgacaattctaatctagcctactcctgcctgttcttcatctcctacggattccagatcctgatcctgatcttttcagcattttcagaaaataatgagtcatcaaataatccatcatccatagcttcattcctgagtagcattacctacagctggtatgacagcatcattctgaaaggctacaagcgtcctctgacactcgaggatgtctgggaagttgatgaagagatgaaaaccaagacattagtgagcaagtttgaaacgcacatgaagagagagctgcagaaagccaggcgggcactccagagacggcaggagaagagctcccagcagaactctggagccaggctgcctggcttgaacaagaatcagartcaaagccaagatgcccttgtcctggaagatgttgaaaagaaaaaaaagaagtctgggaccaaaaaagatgttccaaaatcctggttgatgaaggctctgttcaaaactttctacatggtgctcctgaaatcattcctactgaagctagtgaatgrcatcttcacgtttgtgagtcctcagctgctgaaattgctgatctcctttgcaagtgaccrtgacacatatttgtggattggatatctctgtgcaatcctcttattcactgcggctctcattcagtctttctgccttcagtgttatttccaactgtgcttcaagctgggtgtaaaagtacggacagctatcatggcttctgtatataagaaggcattgaccytatccaacttggccaggaaggagtacaccrttggagaaacagtgaacctgatgtctgtggatgcccagaagctcatggatgtgaccaacttcatgcacatgctgtggtcaagtgttctacagattgtcttatctatcttcttcctatggagagagttgggaccctcagtcttagcaggtgttggggtgatggtgcttgtaatcccaattaatgcdatactgtccaccaagagtaagaccattcaggtcaaaaatatgaagaataaagacaaacgtttaaagatcatgaatgagattcttagtggaatcaagatcctgaaatattttgcctgggaaccttcattcagagaccaagtacaaaacctccggaagaaagagctcaagaacctgctggcctttagtcaactacagtgtgtagtaatattcgtcttccagttaactccagtcctggtatctgtggtcacattttctgtttatgtcctggtggatagcaacaatattttggatgcacaaaaggccttcacctccattaccctcttcaatatcctgcgctttcccctgagcatgcttcccatgatgatctcctccatgctccaggccagtgtttccacagagcggctagagaagtacttgggaggggatgacttggacacatctgccattcgacatgactgcaattttgacaaagccatgcagttttctgaggcctcctttacctgggaacatgattcggaagccacagtccgagatgtgaacctggacattatggcaggccaacttgtggctgtgataggccctgtcggctctgggaaatcctccttgatatcagccatgctgggagaaatggaaaatgtccacgggcacatcaccatcaagggcaccactgcctatgtcccacagcagtcctggattcagaatggcaccataaaggacarcatcctttttggaacagagtttaatgaaaagaggtaccagcaagtactggaggcctgtgctctcctcccagacttggaaatgctgcctggaggagatttggctgagattggagagaagggtataaatcttagtgggggtcagaagcagcggatcagcctggccagagctacctaccaaaatttagacatctatcttctagatgaccccctgtctgcagtggatgctcatgtaggaaaacatatttttaataaggtcttgggccccaatggcctgttgaaaggcaagactcgactcttggttacacatagcatgcactttcttcctcaagtggatgagattgtagttctggggaatggaacaattgtagagaaaggatcctacagtgctctcctggccaaaaaaggagagtttgctaagaatctgaagacatttctaagacatacaggccctgaagaggaagccacagtccatgatggcagtgaagaagaagacgatgactatgggctgatatccagtgtggaasagatccccgaagatgcagcctccataaccatgagaagagagaacagctttcgtcgaacacttagccgcagttctaggtccaatggcaggcatctgaagtccctgagaaactccttgaaaactcggaatgtgaatagcctgaaggaagacgaagaactagtgaaaggacaaaaactaattaagaaggaattcatagaaactggaaaggtgaagttctccatctamctggagtacctacaagcaataggattgttttcratattcttcatcatccttgcgtttgtgatgaattctgtggcttttattggatccaacctctggctcagtgcttggaccagtgactctaaaatcttcaatagcaccgactatccagcatctcagagggacatgagagttggagtctacggagctctgggattagcccaaggtatatttgtgttcatagcacatttctggagtgcctttggtttcgtccatgcatcaaatatcttgcacaagcaactgctgaacaatatccttygagcacctatgagattttttgacacaacacccacaggccggattgtgaacaggtttgccggcgatatttccacagtggatgacaccctgcctcagtccttgcgcagctggattacatgcttcctggggataatcagcacccttgtcatgatctgcatggccactcctgtcttcaccatcatcgtcattcctcttggcattatttatgtatctgttcagatgttttatgtgtctacctcccgccagctgaggcgtctggactctgtcaccaggtccccaatctactctcacttcagcgagaccgtatcaggtttgccagttwtccgtgcctttgagcaccagcagckatttctgaaacacaatgaggwgaggattgacaccaaccagaaatgtgtcttttcctggatcacctccaacaggtggcttgcaattcgcctggagctggttgggaacctgactgtcttcttttcagccttgatgatggttatttatagagataccctaagtggggacactgttggctttgttctgtccaatgcactcaatatcacacaaaccctgaactggctggtgaggatgacatcagaaatagagaccaacattgtggctgttgagcgaataactgagtacacaaaagtggaaaatgaggcaccctgggtgactgataagaggcctcygccagattggcccagcaaaggcaagatccagtttaacaactaccaagtgcggtacygacctgagctggatctggtcctcagagggatcacttgtgacatyggtagcatggagaagattggtgtggtgggcaggacaggagctggaaagtcatccctcacaaactgcctcttcagaatcttagaggctgccggtggtcagattatcattgatggagtagatattgcttccattgggctycacgacctccgagagaagctgaccatcatcccccaggaccccatcctgttctctggaagcctgaggatgaatctcgaccctttcaacaactactcagatgaggagatttggaaggccttggagctggctcayctcaagtcttttgtggccagcctgcaacttgggttatcccacgaagtkacagaggctggtggcaacctgagcataggccagaggcagctgctgtgcctgggcagggctctgcttcggaaatccaagatcctggtcctggatgaggccactgctgcggtggatctagaracagacaacctcattcagacgaccatccaaaacgagttcgcccactgcacagtgatcaccatcgcccacaggctgcayaccatcatggacagtgacaaggtaatggtcctagacaaygggaagattatagagtrcggcagccctgaagaactgctacaaatccctggacccttttactttatggctaaggaagctggcattgagaatgtgaacagcacaaaattctagcagaaggccccatgggttagaaaaggactataagaataatttcttatttaattttattttttataaaatacagaatacatacaaaagtgtgtataaaatgtacgttttaaaaaaggataagtgaacacccatgaacctactacccaggttaagaaaataaatgtcaccaggtacttgagaaacccctcgattgtctacctcgatcgtacttccttgctacccacccctcccagggacaaccactgtcctgaatttcacgataattattcctttg

SEQ ID NO: 86 - DNA, 5084 bp, Homo sapiens
acatcagaatggtagataattcctgttccactttctttgatgaaacaagtaaagaagaaacaacacaatcatattaatagaagagtcttygttccagacgcagtccaggaatcatgctggagaagttctgcaactctactttttggaattcctcattcctggacagtccggaggcagacctgccactttgttttgagcaaactgttctggtgtggattcccttgggctwcctatggctcctggccccctggcagcttctccacgtgtataartccaggaccaagagatcctctaccaccaaactctatcttgctaagcaggtattcgttggttttcttcttattctagcagccatagagctggcccttgtactcacagaagactctggacaagccacagtccctgctgttcgatataccaatccaagcctctacctaggcacatggctcctggttttgctgatccaatacagcagacaatggtgtgtacagaaaaactcctggttcctgtccctattctggattctctcgatactctgtggcactttccaatttcagactctgatccggacactcttacagggtgacaattctaatctagcctactcctgcctgttcttcatctcctacggattccagatcctgatcctgatcttttcagcattttcagaaaataatgagtcatcaaataatccatcatccatagcttcattcctgagtagcattacctacagctggtatgacagcatcattctgaaaggctacaagcgtcctctgacactcgaggatgtctgggaagttgatgaagagatgaaaaccaagacattagtgagcaagtttgaaacgcacatgaagagagagctgcagaaagccaggcgggcactccagagacggcaggagaagagctcccagcagaactctggagccaggctgcctggcttgaacaagaatcagartcaaagccaagatgcccttgtcctggaagatgttgaaaagaaaaaaaagaagtctgggaccaaaaaagatgttccaaaatcctggttgatgaaggctctgttcaaaactttctacatggtgctcctgaaatcattcctactgaagctagtgaatgrcatcttcacgtttgtgagtcctcagctgctgaaattgctgatctcctttgcaagtgaccrtgacacatatttgtggattggatatctctgtgcaatcctcttattcactgcggctctcattcagtctttctgccttcagtgttatttccaactgtgcttcaagctgggtgtaaaagtacggacagctatcatggcttctgtatataagaaggcattgaccytatccaacttggccaggaaggagtacaccrttggagaaacagtgaacctgatgtctgtggatgcccagaagctcatggatgtgaccaacttcatgcacatgctgtggtcaagtgttctacagattgtcttatctatcttcttcctatggagagagttgggaccctcagtcttagcaggtgttggggtgatggtgcttgtaatcccaattaatgcdatactgtccaccaagagtaagaccattcaggtcaaaaatatgaagaataaagacaaacgtttaaagatcatgaatgagattcttagtggaatcaagatcctgaaatattttgcctgggaaccttcattcagagaccaagtacaaaacctccggaagaaagagctcaagaacctgctggcctttagtcaactacagtgtgtagtaatattcgtcttccagttaactccagtcctggtatctgtggtcacattttctgtttatgtcctggtggatagcaacaatattttggatgcacaaaaggccttcacctccattaccctcttcaatatcctgcgctttcccctgagcatgcttcccatgatgatctcctccatgctccaggccagtgtttccacagagcggctagagaagtacttgggaggggatgacttggacacatctgccattcgacatgactgcaattttgacaaagccatgcagttttctgaggcctcctttacctgggaacatgattcggaagccacagtccgagatgtgaacctggacattatggcaggccaacttgtggctgtgataggccctgtcggctctgggaaatcctccttgatatcagccatgctgggagaaatggaaaatgtccacgggcacatcaccatcaagggcaccactgcctatgtcccacagcagtcctggattcagaatggcaccataaaggacarcatcctttttggaacagagtttaatgaaaagaggtaccagcaagtactggaggcctgtgctctcctcccagacttggaaatgctgcctggaggagatttggctgagattggagagaagggtataaatcttagtgggggtcagaagcagcggatcagcctggccagagctacctaccaaaatttagacatctatcttctagatgaccccctgtctgcagtggatgctcatgtaggaaaacatatttttaataaggtcttgggccccaatggcctgttgaaaggcaagactcgactcttggttacacatagcatgcactttcttcctcaagtggatgagattgtagttctggggaatggaacaattgtagagaaaggatcctacagtgctctcctggccaaaaaaggagagtttgctaagaatctgaagacatttctaagacatacaggccctgaagaggaagccacagtccatgatggcagtgaagaagaagacgatgactatgggctgatatccagtgtggaasagatccccgaagatgcagcctccataaccatgagaagagagaacagctttcgtcgaacacttagccgcagttctaggtccaatggcaggcatctgaagtccctgagaaactccttgaaaactcggaatgtgaatagcctgaaggaagacgaagaactagtgaaaggacaaaaactaattaagaaggaattcatagaaactggaaaggtgaagttctccatctamctggagtacctacaagcaataggattgttttcratattcttcatcatccttgcgtttgtgatgaattctgtggcttttattggatccaacctctggctcagtgcttggaccagtgactctaaaatcttcaatagcaccgactatccagcatctcagagggacatgagagttggagtctacggagctctgggattagcccaaggtatatttgtgttcatagcacatttctggagtgcctttggtttcgtccatgcatcaaatatcttgcacaagcaactgctgaacaatatccttygagcacctatgagattttttgacacaacacccacaggccggattgtgaacaggtttgccggcgatatttccacagtggatgacaccctgcctcagtccttgcgcagctggattacatgcttcctggggataatcagcacccttgtcatgatctgcatggccactcctgtcttcaccatcatcgtcattcctcttggcattatttatgtatctgttcagatgttttatgtgtctacctcccgccagctgaggcgtctggactctgtcaccaggtccccaatctactctcacttcagcgagaccgtatcaggtttgccagttwtccgtgcctttgagcaccagcagckatttctgaaacacaatgaggwgaggattgacaccaaccagaaatgtgtcttttcctggatcacctccaacaggtggcttgcaattcgcctggagctggttgggaacctgactgtcttcttttcagccttgatgatggttatttatagagataccctaagtggggacactgttggctttgttctgtccaatgcactcaatatcacacaaaccctgaactggctggtgaggatgacatcagaaatagagaccaacattgtggctgttgagcgaataactgagtacacaaaagtggaaaatgaggcaccctgggtgactgataagaggcctcygccagattggcccagcaaaggcaagatccagtttaacaactaccaagtgcggtacygacctgagctggatctggtcctcagagggatcacttgtgacatyggtagcatggagaagattggtgtggtgggcaggacaggagctggaaagtcatccctcacaaactgcctcttcagaatcttagaggctgccggtggtcagattatcattgatggagtagatattgcttccattgggctycacgacctccgagagaagctgaccatcatcccccaggaccccatcctgttctctggaagcctgaggatgaatctcgaccctttcaacaactactcagatgaggagatttggaaggccttggagctggctcayctcaagtcttttgtggccagcctgcaacttgggttatcccacgaagtkacagaggctggtggcaacctgagcataggccagaggcagctgctgtgcctgggcagggctctgcttcggaaatccaagatcctggtcctggatgaggccactgctgcggtggatctagaracagacaacctcattcagacgaccatccaaaacgagttcgcccactgcacagtgatcaccatcgcccacaggctgcayaccatcatggacagtgacaaggtaatggtcctagacaaygggaagattatagagtrcggcagccctgaagaactgctacaaatccctggacccttttactttatggctaaggaagctggcattgagaatgtgaacagcacaaaattctagcagaaggccccatgggttagaaaaggactataagaataatttcttatttaattttattttttataaaatacagaatacatacaaaagtgtgtataaaatgtacgttttaaaaaaggataagtgaacacccatgaacctactacccaggttaagaaattccttgctacccacccctcccagggacaaccactgtcctgaatttcacgataattattcctttgcctttcatttctgttttatcacctttgtatgtatctttaaacaacatatacccttttttacttatgtaaatggactgactcatactgcatacatcttctatgacttgattct

SEQ ID NO: 87 - DNA, 1732 bp, Homo sapiens
atggactttgacgtcggcagaactacacacctaagttccagtccctgctctgccagtaacgggggtgaatctgggcaagtttctaagcgtcggtgtcttattggagaaagtggacatgataccccgtggtgctcccccatcaaggtgaagtatggggatgtgtactgcagggcccctcaaggaggatactacaaaacagccctgggaaccaggtgcgacattcgctgccagaagggctacgagctgcatggctcttccctactgatctgccagtcaaacaaacgatggtctgacaaggtcatctgcaracaaaagcgatgtcctacccttgccatgccagcaaatggagggtttaagtgtgtagatggtgcctactttaactcccggtgtgagtattattgttcaccaggatacacgttgaaaggggagcggaccgtcacatgtatggacaacaaggcctggagcggccggccagcctcctgtgtggatatggaacctcctagaatcaagtgcccaagtgtgaaggaacgcattgcagaacccaacaaactgacagtccgggtgtcctgggagacacccgaaggaagagacacagcagatggaattcttactgatgtcattctaaaaggcctcyccccaggctccaactttccagaaggagaccacaagatccagtacacagtctatgacagagctgagaataagggcacttgcaaatttcgagttaaagtaagagtcaaacgctgtggcaaactcaatgccccagagaatggttacatgaagtgctccagcgacggtgataattatggagccacctgtgagttctcctgcatcggcggctatgagctccagggtagccctgcccgagtatgtcaatccaacctggcttggtctggcacggagcccacctgtgcagccatgaacgtcaatgtgggtgtcagaacggcagctgcacttctggatcagttttatgaraaaaggagactcctcattgtgtccacacccacagcccgaaacctcctttaccggctccagctaggaatgctgcagcaagcacagtgtggccttgatcttcgacacatcaccgtggtggagctggtgggtgtgttcccgactctcattggcaggataggagcaaagattatgcctccagccctagcgctgcagctcaggctgttgctgcgaatcccactctactycttcagtatggtgctagtggataagcatggcatggacaaagagcgctatgtctccctggtgatgcctgtggccctgttcaacctgattgacacttttcccttgagaaaagaagagatggtcctacaagccgaaatgagccagacctgtaacacctgacatgatggttcctctcttggcaattcctcttcattgtctacatagtgacatgcacacgggaaagccttaaaaatatccttgatgtacagattttatttgtaattttaaaagtctattttattatgagctttctttgcacttaaaaattagcatgctgctttttgtacttggaagtgtttcaaaaaattatatgaccatatttactctttctaactttctttactccatcatggctgsttgattttgtagagaaattagaacccataaccatacacaggctatcaacatgttattcaatgtgacacctaactcttttctattttgttttttaagtaagacttttattaataaaacaaaatgttttggagcaaattta

SEQ ID NO: 88 - DNA, 1888 bp, Homo sapiens
agttttccagcccggccttcgcccgcccgctagcacgcagtcccttggtctcttcggtctcctgccgcccccgggaagcgcgctgcgctgccgaggcgagctaagcgcccgctcgccatggggagccccgcacatcggcccgcgctgctgctgctgctgccgcctctgctgctgctgctgctgctgcgcgtcccgcccagccgcagcttcccaggatcgggagactcaccactagaagacgatgaagtcgggtattcacaccctagatataaagataccccgtggtgctcccccatcaaggtgaagtatggggatgtgtactgcagggcccctcaaggaggatactacaaaacagccctgggaaccaggtgcgacattcgctgccagaagggctacgagctgcatggctcttccctactgatctgccagtcaaacaaacgatggtctgacaaggtcatctgcaracaaaagcgatgtcctacccttgccatgccagcaaatggagggtttaagtgtgtagatggtgcctactttaactcccggtgtgagtattattgttcaccaggatacacgttgaaaggggagcggaccgtcacatgtatggacaacaaggcctggagcggccggccagcctcctgtgtggatatggaacctcctagaatcaagtgcccaagtgtgaaggaacgcattgcagaacccaacaaactgacagtccgggtgtcctgggagacacccgaaggaagagacacagcagatggaattcttactgatgtcattctaaaaggcctcyccccaggctccaactttccagaaggagaccacaagatccagtacacagtctatgacagagctgagaataagggcacttgcaaatttcgagttaaagtaagagtcaaacgctgtggcaaactcaatgccccagagaatggttacatgaagtgctccagcgacggtgataattatggagccacctgtgagttctcctgcatcggcggctatgagctccagggtagccctgcccgagtatgtcaatccaacctggcttggtctggcacggagcccacctgtgcagccatgaacgtcaatgtgggtgtcagaacggcagctgcacttctggatcagttttatgaraaaaggagactcctcattgtgtccacacccacagcccgaaacctcctttaccggctccagctaggaatgctgcagcaagcacagtgtggccttgatcttcgacacatcaccgtggtggagctggtgggtgtgttcccgactctcattggcaggataggagcaaagattatgcctccagccctagcgctgcagctcaggctgttgctgcgaatcccactctactycttcagtatggtgctagtggataagcatggcatggacaaagagcgctatgtctccctggtgatgcctgtggccctgttcaacctgattgacacttttcccttgagaaaagaagagatggtcctacaagccgaaatgagccagacctgtaacacctgacatgatggttcctctcttggcaattcctcttcattgtctacatagtgacatgcacacgggaaagccttaaaaatatccttgatgtacagattttatttgtaattttaaaagtctattttattatgagctttctttgcacttaaaaattagcatgctgctttttgtacttggaagtgtttcaaaaaattatatgaccatatttactctttctaactttctttactccatcatggctgsttgattttgtagagaaattagaacccataaccatacacaggctatcaacatgttattcaatgtgacacctaactcttttctattttgttttttaagtaagacttttattaataaaacaaaatgttttggagcaaattta

SEQ ID NO: 89 - DNA, 1845 bp, Homo sapiens
ggaaaaccggcctgactggggggtgaattcagcagggagtaaatctgatcggcatcaggtctgcggaaaggagctggtgagcacgacaccacccaggcattgcctggctctctccgcggcgggctaagttaaccgcgggtccaggagactaagctgaaactgctgctyagctcccaagatggtgccacccaaattgcatgtgcttttctgcctstgcggctgcctggctgtggtttatccttttgactggcaatacataaatcctgttgcccatatgaaatcatcagcatgggtcaacaaaatacaagtactgatggctgctgcaagctttggccaaactaaaatcccccggggaaatgggccttattccgttggttgtacagacttaatgtttgatcacactaataagggcaccttcttgcgtttatattatccatcccaagataatgatcrccttgacaccctttggatcccaaataaagaatatttttggggtcttagcaaatttcttggaacacactggcttatgggcaacattttgaggttactctttggttcaatgacaactcctgcaaactggaattcccctctgaggcctggtgaaaaatatccacttgttgttttttctcatggtcttggggcattcaggacactttattctgctattggcattgacctggcatctcatgggtttatagttgctgctgtagaacacagagatagatctgcatctgcaacttactatttcaaggaccaatctgctgcagaaayaggggacaagtcttggctctaccttagaaccctgaaacaagaggaggagacacatatacgaaatgagcaggtacggcaaagagcaaaagaatgttcccaagctctcagtctgattcttgacattgatcatggaaagccagtgaagaatgcattagatttaaagtttgatatggaacaactgaaggactctattgatagggaaaaaatagcagtaattggacattcttttggtggagcaacggttattcagactcttagtgaagatcagagattcagatgtggtattgccctggatgcatggatgtttccactgggtgatgaagtatattccagaattcctcagcccctcttttttatcaactctgaatatttccaatatcctgctaatatcataaaaatgaaaaaatgctactcacctgataaagaaagaaagatgattacaatcaggggttcagtccaccagaattttgctgacttcacttttgcaactggcaaaataattggacacatgctcaaattaaagggagacatagattcaaatgyagctattgatcttagcaacaaagcttcatyagcattcttacaaaagcatttaggacttcataaagattttgatcagtgggactgcttgattgaaggagatgatgagaatcttattccagggaccaacattaacacaaccaatcaacacatcatgttacagaactcttcaggaatagagaaatacaattaggattaaaataggttttttaaaagtcttgtttcaaaactgtctaaaattatgtgtgtgtgtgtgtgtgtgtgtgwgwgagagagagagagagagagagagagagaattttaatgtattttcccaaaggactcatattttaaaatgtaggctatactgtaatcgtgattgaagcttggactaagaattttttccctttagatgtaaagaaagaatacagtatacaatattcatatcagcctaaattttaattttaaagatgattccttttcagtgtcgaagttaaaaactgtttttacattactttgacagacaagtagattaaaacaggcaaaatcccagtg

SEQ ID NO: 90 - DNA, 1964 bp, Homo sapiens
cctcctccagcwtcaccaggggaggagagggtcggggccacaaggccgcgctaggcggacccaggacacagcccgcgcgcagcccacccgcccgccgcctgccagagctgctcggcccgcagccagggggacagcggctggtcggaggctcgcagtgctgtcggcgagaagcagtcgggtttggagcgcttgggtcgcgttggtgcgcggtggaacgcgcccagggaccccagttcccgcgagcagctccgcgccgcgcctgagagactaagctgaaactgctgctyagctcccaagatggtgccacccaaattgcatgtgcttttctgcctstgcggctgcctggctgtggtttatccttttgactggcaatacataaatcctgttgcccatatgaaatcatcagcatgggtcaacaaaatacaagtactgatggctgctgcaagctttggccaaactaaaatcccccggggaaatgggccttattccgttggttgtacagacttaatgtttgatcacactaataagggcaccttcttgcgtttatattatccatcccaagataatgatcrccttgacaccctttggatcccaaataaagaatatttttggggtcttagcaaatttcttggaacacactggcttatgggcaacattttgaggttactctttggttcaatgacaactcctgcaaactggaattcccctctgaggcctggtgaaaaatatccacttgttgttttttctcatggtcttggggcattcaggacactttattctgctattggcattgacctggcatctcatgggtttatagttgctgctgtagaacacagagatagatctgcatctgcaacttactatttcaaggaccaatctgctgcagaaayaggggacaagtcttggctctaccttagaaccctgaaacaagaggaggagacacatatacgaaatgagcaggtacggcaaagagcaaaagaatgttcccaagctctcagtctgattcttgacattgatcatggaaagccagtgaagaatgcattagatttaaagtttgatatggaacaactgaaggactctattgatagggaaaaaatagcagtaattggacattcttttggtggagcaacggttattcagactcttagtgaagatcagagattcagatgtggtattgccctggatgcatggatgtttccactgggtgatgaagtatattccagaattcctcagcccctcttttttatcaactctgaatatttccaatatcctgctaatatcataaaaatgaaaaaatgctactcacctgataaagaaagaaagatgattacaatcaggggttcagtccaccagaattttgctgacttcacttttgcaactggcaaaataattggacacatgctcaaattaaagggagacatagattcaaatgyagctattgatcttagcaacaaagcttcatyagcattcttacaaaagcatttaggacttcataaagattttgatcagtgggactgcttgattgaaggagatgatgagaatcttattccagggaccaacattaacacaaccaatcaacacatcatgttacagaactcttcaggaatagagaaatacaattaggattaaaataggttttttaaaagtcttgtttcaaaactgtctaaaattatgtgtgtgtgtgtgtgtgtgtgtgwgwgagagagagagagagagagagagagagaattttaatgtattttcccaaaggactcatattttaaaatgtaggctatactgtaatcgtgattgaagcttggactaagaattttttccctttagatgtaaagaaagaatacagtatacaatattcatatcagcctaaattttaattttaaagatgattccttttcagtgtcgaagttaaaaactgtttttacattactttgacagacaagtagattaaaacaggcaaaatcccagtg

SEQ ID NO: 91 - DNA, 3618 bp, Homo sapiens
gacgcgcgagcatcggcggcccggaaccggccttggaacaactgtggaacctgaggccgcttgccctcccgccccatggagcggcccccggggctgcggccgggcgcgggcgggccctgggagatgcgggagcggctgggcaccggcggcttcgggaacgtctgtctgtaccagcatcgggaacttgatctcaaaatagcaattaagtcttgtcgcctagagctaagtaccaaaaacagagaacgatggtgccatgaaatccagattatgaagaagttgaaccatgccaatgttgtaaaggcctgtgatgttcctgaagaattgaatattttgattcatgatgtgcctcttctagcaatggaatactgttctggaggagatctccgaaagctgctcaacaaaccagaaaattgttgtggacttaaagaaagccagatactttctttactaagtgatataggrtctgggattcgatatttgcatgaaaacaaaattatacatcgagatctaaaacctgaaaacatagttcttcaggatgttggtggaaagataatacataaaataattgatctgggatatgccaaagatgttgatcaaggaagtctgtgtacatcttttgtgggaacactgcagtatctggccccagagctctttgagaataagccttacacagccactgttgattattggagctttgggaccatggtatttgaatgtattgctggatataggccttttttgcatcatctgcagccatttacctggcatgagaagattaagaagaaggatccaaagtgtatatttgcatgtgaagagatgtcaggagaagttcggtttagtagccatttacctcaaccaaatagcctttgtagtttartagtagaacccatggaaaactggctacasttgatgttgaattgggaccctcagcagagaggaggacctgttgaccttactttgaagcagccaagatgttttgtattaatggatcacattttgaatttgaagatagtacacatcctaaatatgacttctgcaaagataatttcttttctgttaccacctgatgaaagtcttcattcactacagtctcgtattgagcgtgaaactggaataaatactggttctcaagaacttctttcagagacaggaatttctctggatcctcggaaaccagcctctcaatgtgttctagatggagttagaggctgtgatagctatatggtttatttgtttgataaaagtaaaactgtatatgaagggccatttgcttccagaagtttatctgattgtgtaaattatattgtacaggacagcaaaatacagcttccaattatacagctgcgtaaagtgtgggctgaagcagtgcactatgtgtctggactaaaagaagactatagcaggctctttcagggrcaaagggcagcaatgttaagtcttcttagatataatgctaacttaacaaaaatgaagaacactttgatctcagcatcacaacaactgaaagctaaattggagttttttcacaaaagyattcagcttgacttggagagatacagcgagcagatgacgtatggratatcttcagaaaaaatgctaaaagcatggaaagaaatggaagaaaaggccatccactatgctgaggttggtgtcattggatacctggaggatcagattatgtctttgcatgctgaaatcatggagctacagaagagcccctatggaagacgtcagggagacttgatggaatctctggaacagcgtgccattgatctatataagcagttaaaacacagaccttcagatcactcctacagtgacagcacagagatggtgaaaatcattgtgcacactgtgcagagtcaggaccgtgtgctcaaggagctgtttggtcatttgagcaagttgttgggctgtaagcagaagattattgatctactccctaaggtggaagtggccctcagtaatatcaaagaagctgacaatactgtcatgttcatgcagggaaaaaggcagaaagaaatatggcatctccttaaaattgcctgtacacagagttctgcccggtcccttgtaggatccagtctagaaggtgcagtaacccctcagacatcagcatggctgcccccgacttcagcagaacatgatcattctctgtcatgtgtggtaactcctcaagatggggagacttcagcacaaatgatagaagaaaatttgaactgccttggccatttaagcactattattcatgaggcaaatgaggaacagggcaatagtatgatgaatcttgattggagttggttaacagaatgagttgtcacttgttcactgtccccaaacctatggaagttgttgctatacatgttggaaatgtgtttttcccccatgaaaccattcttcagacatcagtcaatggaagaaatggctatgaacagaaactacatttctactatgatcagaagaacatgattttacaagtataacagttttgagtaattcaagcctctaaacagacaggaatttagaaaaagtcaatgtacttgtttgaatatttgttttaataccacagctatttagaagcatcatcacgacacatttgccttcagtcttggtaaaacattacttatttaactgattaaaaataccttctatgtattagtgtcaacttttaacttttgggcgtaagaccaaatgtagttttgtatacagagaagaaaacctcaagtaataggcattttaagtaaaagtctacctgtgtttttttctaaaaaggctgctcacaagttctatttcttgaagaataaattctacctccttgtgttgcactgaacaggttctcttcctggcatcataaggagttggtgtaatcattttaaattccactgaaaatttaacagtatccccttctcatcgaagggattgtgtatctgtgcttctaatmttagttggctttcataaatcatgttgktgtgtgtatatgtatttaagatgtacatttaataatatcaaagagaagatgcctgttaatttataatgtatttgaaaattacatgttttttcatttgtaaaaatgagtcatttgtttaaacaatctttcatgtcttgtcatacaaatttataaaggtctgcactcctttatctgtaattgtaattccaaaatccaaaaagctctgaaaacaaggtttccataagcttggtgacaaaattcatttgcttgcaatctaatctgaactgaccttgaatctttttatcccatttagtgtgaatattcctttattttgctgcttgatgatgagagggagggctgctgccacakactgtggtgagggctggttaatgtagtatggtatatgcacaaaactacttttctaaaatctaaaatttcataattctgaaacaacttgccccaagggtttcagagaaaggactgtggacctctatcatctgctaagtaatttagaagatattatttgtcttaaaaaatgtgaaatgcttttatattctaatagtttttcactttgtgtattaaatggtttttaaattactttcttgatctctattcattataaaaatcagattataataaaacagttgaatatggcttaggaaaatatgaag

SEQ ID NO: 92 - DNA, 14194 bp, Homo sapiens
cgtttgcttacaggtgacccatgggctgagggcatacgatggcttgtctctgcctgaggacatagagaccgtcacagcaagccaaatgcgctggacacattcgtacctttctgatgatgaggacatgctggctgacagcatctcaggagacgamctgggcagtggggacctgggcagcggggacttccagatggtttatttccgagccctggtgaatttcactcgctccatcgagtacagccctcagctggaggatgcaggctccagagagttycgagaggtgtccgaggctgtggtagacacgctggagtcggagtacttgaaaattcccggagaccaggttgtcagtgtggtgttcatcaaggagctggatggctgggtttttgtggagctsgatgtgggctcggaagggaatgcggatggkgctcagattcaggagatgctgctcagggtcatctccagcggctctgtggcctcctacgtcacctctccccagggattccagttccgacgcctgggcacagtgccccagttcccaagagcctgcacggaggccgagtttgcctgccacagctacaatgagtgtgtggccctggagtatcgctgtgaccggcggcccgactgcagggacatgtctgatgagctcaattgtgaggagccagtcctgggtatcagccccacattctctctcctygtggagacgacatctttaccgccccggccagagacaaccatcatgcgacagccaccagtcacccacgctcctcagcccctrcttcccggttccgtcaggcccctgccctgtgggcccmrggaggccgcatgccgcaatgggcactgcatccccagagactacctctgcgacggacaggaggactgcgaggacggcagcgatgagctagactgtggccccccgccaccctgtgagcccaacgagttcccctgcgggaatggacattgtgccctcaagctgtggcgctgcgatggtgactttgactgtgaggaccgaactgatgaagccaactgccccaccaagcgtcctgaggaagtgtgcgggcccacacagttccgatgcgtctctaccaacatgtgcatcccagccagcttccactgtgacgaggagagcgactgtcctgaccggagcgacgagtttggctgcatgcccccccaggtggtgacacctccccgggagtccatccaggcttcccggggccagacagtgaccttcacctgcgtggccattggcgtccccacccccatcatcaattggaggctcaactggggccacatcccctctcatcccagggtgacagtgaccagcgagggtggccgtggcacactgatcatccgtgatgtgaaggagtcagaccagggtgcctacacctgtgaggccatgaacgcccggggcatggtgtttggcattcctgacggtgtccttgagctcgtcccacaacgagcaggcccctgccctgacggccacttctacctggagcacagcgccgcctgcctgccctgcttctgctttggcatcaccagcgtgtgccagagcacccgccgcttccgggaccagatcaggctgcgctttgaccaacccgatgacttcaagggtgtgaatgtgacaatgcctgcgcagcccggcacgccacccctctcctccacgcagctgcagatcgacccatccctgcacgagttccagctagtcgacctgtcccgccgcttcctcgtccaygactccttctgggctctgcctgaacagttcctgggcaacaaggtggactcctatggcggctccctgcgttacaacgtgcgctacgagttggcccgtggcatgctggagccagtgcagcggccggacgtggtcctcrtgggtgccgggtaccgcctcctctcccgaggccacacacccacccamcctggtgctctgaaccagcgccaggtccagttctctgaggagcactgggtccatgagtctggccggccggtgcagcgcgcggagctgctgcaggtgctgcagagcctggaggccgtgctcatccagaccgtgtacaacaccaagatggcyagcgtgggacttagcgacatcgccatggataccaccgtcacccatgccaccagccatggccgtgcccacagtgtggaggagtgcagatgccccattggctattctggcttgtcctgcgagagctgtgatgcccacttcactcgggtgcctggtgggccctacctgggcacctgctctggttgcarttgcaatggccatgccagctcctgtgaccctgtgtatggccactgcctgaattgccagcacaacacggaggggccacagtgcaacaagtgcaaggctggcttctttggggacgccatgaaggccacggccacttcctgccggccctgcccttgcccatacatcgatgcctcccgcagattctcagacacttgcttcctggacacggatggccaagccacatgtgacgcctgtgccccaggctacactggccgccgctgtgagagctgtgcccccggatacgagggcaaccccatccagcccrgcgggaagtgcaggcccgtcaaccaggagattgtgcgctgtgacgagcgtggcagcatggggacctccggggaggcctgccgctgtaagaacaatgtggtggggcgcttgtgcaatgaatgtgctgacggctctttccacctgagtacccgaaaccccgatggctgcctcaagtgcttctgcatgggtgtcagtcgccactgcaccagctcttcatggagccgtgcccagttgcatggggcctctgaggagcctggtcacttcagcctgaccmacgccgcaagcacccacaccaccaacgagggcatcttctcccccacgcccggggaactgggattctcctccttccacagactcttatctggaccctacttctggagcctcccttcacgcttcctgggggacaaggtgacctcctatggaggagagctgcgcttcacagtgacccagaggtcccagcygggctccacacccctgcacgggcagccgttggtggtgctgcaaggtaacaacatcatcctagagcaccatgtggcccaggagcccagccccggccagcccagcaccttcattgtgcctttccgggagcaagcatggcagcggcccgatgggcagccagccacacgggagcacctgctgatggcactggcaggcatcgacaccctcctgatccgagcatcctacgcccagcagcccrctgagagcagggtctctggcatcagcatggacgtggctgtgccygaggaaaccggccaggaccccgcrctggaagtggaacagtgctcctgcccacccgggtaccgtgggccgtcctgccaggactgtgacacaggctacacacgcacgcccagtggcctctacctgggtacctgtgaacgctgcagctgccatggccactcagaggcctgcgagccagaaacaggtgcctgccagggctgccagcatcacacggagggccctcrgtgtgagcagtgccagccaggatactacggggacgcccagcgggggacaccacaggactgccagctgtgcccctgctacggagaccctgctgccggccaggctgcccacacttgttttctggacacagacggccaccccacctgtgatgcgtgctccccaggccacagtgggcgtcactgtgagaggtgcgcccctggctactatggcaaccccagccagggccagccatgccagagagacagccaggtgccagggcccataggctgcaactgtgacccccaaggcagcrtcagcagccagtgtgatgctgctggtcagtgccagtgcaaggcccaggtrgaaggcctcacttgcagccactgccggccccaccacttccacctgagtgccagcaacccagacggctgcctgccctgcttctgtatgggcatcacccagcagtgcgccagctctgcctacacacgccacctgatctccacccactttgcccctggggacttccaaggctttgccctggtgaacccacagcgaaacagccgcctgacaggagaattcactgtggaacccgtgcccragggtgcccagctctcttttggcaactttgcccaactcggccaygagtccttctactggcagctgccggagacataccagggagacaaggtggcggcctacggtgggaagttgcgatacaccctctcctacacagcaggcccacagggcagcccactctctgaccccgatgtgcagatcacgggcaacaacatcatgctagtggcctcccagccagcgctgcagggccctgagaggaggagctacgagatcatgttccgagaggaattctggcgcyggcccgatgggcagccggccacacgcgagcacctcctgatggcactggccgacctggatgagctcctgatccgggccacgttctcctccgtgccgctggyggccagcatcagcgcagtcagcctggaggtcgcccagccggggccctcaaacagaccccgcgccctcgaggtggaggagtgccgctgcccgccaggctacatcggtctgtcctgccaggactgtgcccccggctacacgcgcaccgggagtgggctctacctcggccactgcgagctatgtgaatgcaatggccactcagacctgtgccacccagagactggggcctgctcgcaatgccagcacaacgccgcaggggagttctgcgagctttgtgcccctggctactacggagatgccacagccgggacgcctgaggactgccagccctgtgcctgcccactgaccaacccagagaacatgttttcccgcacctgtgagagcctgggagccggcgggtaccgctgcacggcctgcgaacccggctacactggccagtactgtgagcagtgtggcccaggttacgtgggtaaccccagtgtgcaagggggccagtgcctgccagagacaaaccaagccccactggtggtcgaggtccatcctgctcgaagcatagtgccccaaggtggctcccactccctgcggtgtcaggtcagtgggagcccaccccactacttctattggtcccgtgaggatgggcggcctgtgcccagcggcacccagcagcgacatcaaggctccgagctccacttccccagcgtccagccctcggatgctggggtctacatttgcacctgccgtaatctccaccaatccaataccagccgggcagagctgctggtcactgaggctccaagcaagcccatcacagtgactgtggaggagcagcggagccagagcgtgcgccccggagctgacgtcaccttcatctgcacagccaaaagcaagtccccagcctataccctggtgtggacccgcctgcacaacgggaaactgcccacccgagccatggatttcaatggcatcctgaccattcgcaacgtccagctgagtgatgcaggcacctacgtgtgcaccggctccaacatgtttgccatggaccagggcacagccactctacatgtgcaggcctcgggcaccttgtccgcccccgtggtctccatccatccgccacagctcacagtgcagcccgggcaactggcggagttccgctgcagcgccacagggagccccacgcccaccctcgagtggacagggggccccggcggccagctccctgcgaaggcacaaatccayggcggcatcctgyrcctgccagctgtcgagcccacggatcaggcccagtacttgtgccgagcccacagcagcgctgggcagcaggtggccagggctgtgctccacgtgcatgggggcggtgggcccagagtccaagtgagcccagagaggacccagrtccacgcaggccgcaccgtcaggctgtactgcagggctkcaggcgtgcctagcgccaccatcacctggaggaaggaagggggcagcctcccaccacaggcccggtcagagcgcacagacatcgcgacactgctcatcccagccatcacgactgctgacgccggcttctacctctgcgtggccaccagccctgcaggcactgcccaggcccggatccaagtggttgtcctttcagcctcagatgccagcccaccgccggtcaagattgagtcctcatcgccttctgtgacagaagggcaaacactcgacctcaactgtgtggkggcagggtcagcccatgcccaggtcacctggtacaggcgagggggtagcctgcctccccacacccaggtgcacggctcccgtctgcggctcccccaggtctcaccagctgattctggagaatatgtgtgccgtgtggagaatggatcgggccccaaggaggcctccattactgtgtctgtrctccacggcacccattctggccccagctacaccccagtgcccggcagcacccggcccatccgcatcgagccctcctcctcacacgtggcggaagggcagaccctggatctgaactgcgtggtgcccgggcaggcccacgcccaggtcacrtggcacaagcgtgggggcagcctccctgcccggcaccagacccacggctcgctgctgcggctgcaccaggtgaccccggccgactcaggcgagtatgtgtgccatgtggtgggcacctccrgccccctagaggcctcagtcctggtcaccatcgaagcctctgtcatccctggacccatcccacctgtcaggatcgagtcttcatcctccacagtggccgagggccagaccctggatctgagctgcgtggtggcagggcaggcccacgcccaggtcacatggtacaagcgtgggggcagcctccctgcccggcaccaggttcgtggctcccgcctgtacatcttccaggcctcacctgccgatgcgggacagtacgtctgccgggccagcaacggcatggaggcctccatcacggtcacagtaactgggacccagggggccaacttagcctaccctgccggcagcacccagcccatccgcatygagccctcctcctcgcaagtggcggaagggcagaccctggatctgaactgcgtggtgcccgggcagtcccatgcccaggtcacgtggcacaagcgtgggggcagcctccctgtccggcaccagacccacggctccctgctgagactctaccaagcrtcccccgccgactcgggcgagtacgtgtgccgagtgttgggcagctccgtgcctctagaggcctctgtcctggtcaccattgagcctgcgggctcagtgcctgcwcttggggtcacccccacggtccggatcgagtcatcgtcttcgcaagtggccgaggggcagaccctggacctgaactgcctcgttgctggtcaggcccatgcccaggtcacgtggcacaagcgcgggggcagcctcccggcccggcaccaggtgcatggctcgaggctacgcctgctccaggtgaccccagctgattcaggggagtacgtgtgycrtgtggtcggcagctcaggtayccaggaagcctcagtccttgtcaccatccagcagcgccttagtggctcccactcccagggtgtggcgtaccccgtccgcatcgagtcctcctcagcctccctggccaatggacacaccctggacctcaactgcctggttgccagccaggctccccacaccatcacctggtataagcgtggaggcagcttacccagccggcaccagatcgtgggctcccggctgcggatccctcaggtgactccggcagactcgggcgagtacgtgtgtcacgtmagtaacggtgcaggctcccgggagacctcgctcatcgtcaccatccagggcagcggttcctcccacgtgcccagcgtctccccaccgatcaggatcgagtcgtcttcccccacggtggtggaagggcagaccttggatctgaactgcgtggtcgccaggcagccccaggctatcatcacatggtacaagcgtgggggcagccttccctcccgacaccagacccatggctcccacctgcggttgcaccaaatgtctgtggctgactcgggcgagtatgtgtgccgggccaacaacaacatcgatgccctggaggcctccatcgtcatctccgtctcccctagcgccggcagcccctccgcccctggcagctccatgcccatcagaattgagtcatcctcctcacacgtggccgaaggggagaccctggatctgaactgcgtggtccccgggcaggcccatgcccaggtcacttggcacaagcgtgggggcagcctccccagtcaccatcagacccgcggctcacggctgcggctgcaccatgtgtccccggccgactcgggtgaatacgtgtgccgggtgatgggcagctctggccccctggaggcctcagtcctggtcaccatcraagcctctggctcaagtgctgtccacgtccccgccccaggtggagccccacccatccgcatcgagccctcctcctcccgagtggcagaagggcagaccctggatctgaagtgcgtggtgcccgggcaggcccacgcccaggtcacgtggcacaagcgtggaggaaacctccctgcccggcaccaggtccayggcccactgctgaggctgaaccaggtgtccccggctgactctggcgagtactcgtgccaagtgaccggaagctcaggcaccctggaggcatctgtcctggtcacaattgagccctccagcccaggacccattcctgctccaggactggcccagcccatctacatcgaggcctcctcttcacacgtgactgaagggcagactctggatctgaactgtgtggtgcccgggcaggcccatgcccaggtcacgtggtacaagcgcgggggcagcctccccgcccggcaccagacccatggctcccagctgcggctccaccwcrtctcccctgccgactcaggcgagtatgtgtgtcgtgcagccrgcggcccaggccctgagcaagaagcctccttcacagtcaccgtcccgcccagtgaggggtcttcctaccgccttaggagcccggtcatctccatcgacccgcccagcagcaccgtgcagcagggccagratgccagcttcaagtgcctcatccatgacggggcagcccccatcagcctcgagtggaagacccggaaccaggagctggaggacaacgtccacatcagtcccaatggctccatcatcaccatcgtgggcacccggcccagcaaccacggtacctaccgctgcgtggcctccaatgcctacggtgtggcccagagtgtggtgaacctcagtgtgcaygggccccctacagtgtccgtgctccccgagggccccgtgtgggtgaaagtgggaaaggctgtcaccctggagtgtgtcagtgccggggagccccgctcctctgctcgttggacccggatcagcagcacccctgccaagttggagcagcggacatatgggctcatggacagccacrcggtgctgcagatttcatcagctaaaccatcagatgcrggcacttatgtgtgccttgctcagaatgcactaggcacagcacagaagcaggtggaggtgatcgtggacacgggcgccatggccccaggggcccctcaggtccaagctgaagaagctgagctgactgtggaggctggacacacggccaccttgcgctgctcagccacaggcagccccgygcccaccatccactggtccaagctgcgttccccactgccctggcagyaccggctggaaggtgacacactcatcataccccgggtagcccagcaggactcgggccagtacatctgcaatgccactagccctgcygggcacgctgaggccaccatcatcctgcacgtggagagcccaccatatgccaccacggtcccagagcacgcttcggtgcaggcaggggagacggtgcagctccagtgcctggctcacgggacacccccactcaccttccagtggagccgcgtgggcagcagccttcctgggagggcgaccgccaggaacgagctgctgcactttgagcgtgcagcccctgaggactcaggccgctaccgctgccgggtcaccaacaaggtgggctcagccgaggcctttgcccagctgctcgtccaaggccctcccggctctctccctgccacctccatcccagcagggtccacgcccaccgtgcaggtcacgcctcagctagagaccaagagcattggggccagygttgagttccaytgtgctgtgcccagcgaccggggtacccagctccgttggttcaaggaagggggtcagctgcctccgggtcacagcgtgcaggatggggtgctccgaatccagaacttggaccagagctgccaagggacgtatatatgccaggcccatggaccttgggggaaggcccaggccagtgcccagctggttatccaagccctgccctcggtgctcatcaacatccggacctctgtgcagaccgtggtggttggccacgccgtggagttcgaatgcctggcactgggtgaccccaagcctcaggtgacatggagcaaagttggagggcacctgyggccaggcattgtgcagagcggaggtgtygtcaggatcgcccacgtagagctggctgatgcgggacagtatcgctgcactgccaccaacgcagctggcaccacacaatcccacgtcctgctgcttgtgcaagccttgccccagatctcaatgccccaagaagtccgtgtgcctgctggttctgcagctgtcttcccctgcatagcctcaggctaccccactcctgacatcagctggagcaagctggatggcagcctgccacytgacagccgcctggagaacaacatgctgatgctgccctcagtccraccccaggacgcaggtacctacrtctgcaccgccactaaccgccagggcaaggtcaaagcctttgcccacctgcaggtgccagagcgggtggtgccctacttcacgcagaccccctactccttcctaccgctgcccaccatcaaggatgcctacaggaagttcgagatcaagatcaccttccggccygactcagccgatgggatgctgctgtacaatgggcagaagcgagtcccagggagccccaccaacctggccaaccggcagcccgacttcatctccttcggcctcgtkgggggaaggcccgagttccggttcgatgcaggctcaggcatggccaccatccgccatcccacaccactggccctgggccatttccacaccgtgaccctgctgcgcagcctcacccagggctccctgattgtgggtgacctggccccggtcaaygggacctcccagggcaagttccagggcctggatctgaacgaggaactctacctgggtggctatcctgactatggtgccatccccaaggcggggctgagcagcggcttcataggctgtgtccgggagctgcgcatccagggcgaggagatcgtcttccatgacctcaacctcacggcgcacggcatctcccactgccccacctgtcgggaccggccctgccagaatggcggtcagtgccatgactctgagagcagcagctacgtgtgcgtctgcccagctggcttcaccgggagccgctgtgagcactcgcaggccctgcactgccatccagaggcctgtgggccsgaygccacctgtgtgaaccggcctgacggtcgaggctacacctgccgctgccacctgggccgctcggggttgcggtgtgaggaaggtgtgacagtgaccaccccctcgctgtcgggtgctggctcctacctggcactgcccgccctcaccaacacacaccacgagctacgcctggacgtggagttcaagccactcgcccctgacggggtcctgctgttcagcggggggaagagcgggcctgtggaggacttcgtgtccctggcgatggtgggyggccacctggagttccgctatgagttggggtcagggctggccgttctgcggagcgccgagccgctggccctgggccgctggcaccgtgtgtctgcagagcgtctcaacaaggacggcagcctgcgggtgaatggtggacgccctgtgctgcgctcctcgcccggcaagagccagggcctcaacctgcacaccctgctctacctggggggtgtggagccttccgtgccactgtccccggccaccaacatgagcgctcacttccgcggctgtgtgggcgaggtgtcagtgaatggcaaacggctggacctcacctacagtttcctaggcagccagggcatcgggcaatgctatgayagctccccatgtgagcgccagccttgccaacatggtgccacgtgcatgcccgctggcgagtatgagttccagtgcctgtgtcgagatggattcaaaggagacctgtgtgagcacgaggagaacccctgccagctccgtgaaccctgtctgcatgggggcacctgccagggcacccgctgcctctgcctccctggcttctctggcccacgctgccaacaaggctctggacatggcatagcagagtccgactggcatcttgaaggcagcgggggcaatgatgcccctgggcagtacggagcctatttccacgatgatggcttcctcgccttccctggccatgtcttctccaggagcctgcccgaggtgcccgagaccatcgagctggaggttcggaccagcacagccagtggcctcctgctctggcagggtgtggaggtgggagaggccggccaaggcaaggacttcatcagcctcgggcttcaagacgggcaccttgtcttcaggtaccagctgggtagtggggaggcccgcctggtctctgaggaccccatcaatgacggcgagtggcaccgggtgacagcactgcgggagggccgcagaggttccatccaagtcgacggtgaggagctggtcagcggcmggtscccaggtcccaacgtggcagtcaacgccaagggcarcrtctacatcggcggagcccctgacgtggccacgctgaccgggggcagattctcctcrggcatcacaggctgtgtcaagaacctggtgctgcactyggcccgacccggcgccccgcccccacagccyctggacctgcagcaccgcgcccaggccggggccaacacacgcccctgcccctcgtaggcacctgcctgccccacacggactcccgggccacgccccagcccgacaatgtcgagtatattattattaatattattatgaatttttgtaagaaaccgaggcgatgccacgctttgctgctmccgccctgggctggactggaggtgggcatgccaccctcacacacacagctgggcaaagccacaaggctggccagcaaggcaggttggatgggagtgggcacctcagaaagtcaccaggacttggggtcaggaacagtggctgggtgggcccagaastgcccccactgtccccctacccaccgatggagcccccagatagagctgggtggcctgtttctgcagcccttgggcagttctcactcctaggagagccaacctcggcttgtgggctggtgccccacagctacctgagacgggcatcgcaggagtctctgccacccactcaggattgggaattgtctttagtgccggctgtggagcaaaaggcagctcacccctgggcaggcggtccccatccccaccagctcgtttttcagcacccccacccacctccacccagcccctggcacctcctctggcagactccccctcctaccacgtcctcctggcctgcattcccacccsctcctgccagcacacagcctggggtccctccctcaggggctgtaagggaaggcccaccccaactcttaccaggagctgctacaggcagagcccagcactgatagggccccgcccaccgggccccgcccaccccaggccacatccccacccatctggaagtgaaggcccagggactcctccaacagamaacggacggacggatgccgctggtgctcaggaagagctagtgccttaggtgggggaaggcaggactcacgactgagagagasaggagggggatatgaccaccctgccccatctgcaggagcctgaagrtccagctcaagtgccatcctgccagtggcccccagactgtggggttgggaygcctggcctctgtgtcctagaagggaccctcctgtggtctttgtcttgatttttcttaataaacggtgctatc

SEQ ID NO: 93 - DNA, 13711 bp, Homo sapiens
cgtttgcttacaggtgacccatgggctgagggcatacgatggcttgtctctgcctgaggacatagagaccgtcacagcaagccaaatgcgctggacacattcgtacctttctgatgatgaggacatgctggctgacagcatctcaggagacgamctgggcagtggggacctgggcagcggggacttccagatggtttatttccgagccctggtgaatttcactcgctccatcgagtacagccctcagctggaggatgcaggctccagagagttycgagaggtgtccgaggctgtggtagacacgctggagtcggagtacttgaaaattcccggagaccaggttgtcagtgtggtgttcatcaaggagctggatggctgggtttttgtggagctsgatgtgggctcggaagggaatgcggatggkgctcagattcaggagatgctgctcagggtcatctccagcggctctgtggcctcctacgtcacctctccccagggattccagttccgacgcctgggcacagtgccccagttcccaagagcctgcacggaggccgagtttgcctgccacagctacaatgagtgtgtggccctggagtatcgctgtgaccggcggcccgactgcagggacatgtctgatgagctcaattgtgaggagccagtcctgggtatcagccccacattctctctcctygtggagacgacatctttaccgccccggccagagacaaccatcatgcgacagccaccagtcacccacgctcctcagcccctrcttcccggttccgtcaggcccctgccctgtgggcccmrggaggccgcatgccgcaatgggcactgcatccccagagactacctctgcgacggacaggaggactgcgaggacggcagcgatgagctagactgtggccccccgccaccctgtgagcccaacgagttcccctgcgggaatggacattgtgccctcaagctgtggcgctgcgatggtgactttgactgtgaggaccgaactgatgaagccaactgccccaccaagcgtcctgaggaagtgtgcgggcccacacagttccgatgcgtctctaccaacatgtgcatcccagccagcttccactgtgacgaggagagcgactgtcctgaccggagcgacgagtttggctgcatgcccccccaggtggtgacacctccccgggagtccatccaggcttcccggggccagacagtgaccttcacctgcgtggccattggcgtccccacccccatcatcaattggaggctcaactggggccacatcccctctcatcccagggtgacagtgaccagcgagggtggccgtggcacactgatcatccgtgatgtgaaggagtcagaccagggtgcctacacctgtgaggccatgaacgcccggggcatggtgtttggcattcctgacggtgtccttgagctcgtcccacaacgaggcccctgccctgacggccacttctacctggagcacagcgccgcctgcctgccctgcttctgctttggcatcaccagcgtgtgccagagcacccgccgcttccgggaccagatcaggctgcgctttgaccaacccgatgacttcaagggtgtgaatgtgacaatgcctgcgcagcccggcacgccacccctctcctccacgcagctgcagatcgacccatccctgcacgagttccagctagtcgacctgtcccgccgcttcctcgtccaygactccttctgggctctgcctgaacagttcctgggcaacaaggtggactcctatggcggctccctgcgttacaacgtgcgctacgagttggcccgtggcatgctggagccagtgcagcggccggacgtggtcctcrtgggtgccgggtaccgcctcctctcccgaggccacacacccacccamcctggtgctctgaaccagcgccaggtccagttctctgaggagcactgggtccatgagtctggccggccggtgcagcgcgcggagctgctgcaggtgctgcagagcctggaggccgtgctcatccagaccgtgtacaacaccaagatggcyagcgtgggacttagcgacatcgccatggataccaccgtcacccatgccaccagccatggccgtgcccacagtgtggaggagtgcagatgccccattggctattctggcttgtcctgcgagagctgtgatgcccacttcactcgggtgcctggtgggccctacctgggcacctgctctggttgcarttgcaatggccatgccagctcctgtgaccctgtgtatggccactgcctgaattgccagcacaacacggaggggccacagtgcaacaagtgcaaggctggcttctttggggacgccatgaaggccacggccacttcctgccggccctgcccttgcccatacatcgatgcctcccgcagattctcagacacttgcttcctggacacggatggccaagccacatgtgacgcctgtgccccaggctacactggccgccgctgtgagagctgtgcccccggatacgagggcaaccccatccagcccrgcgggaagtgcaggcccgtcaaccaggagattgtgcgctgtgacgagcgtggcagcatggggacctccggggaggcctgccgctgtaagaacaatgtggtggggcgcttgtgcaatgaatgtgctgacggctctttccacctgagtacccgaaaccccgatggctgcctcaagtgcttctgcatgggtgtcagtcgccactgcaccagctcttcatggagccgtgcccagttgcatggggcctctgaggagcctggtcacttcagcctgaccmacgccgcaagcacccacaccaccaacgagggcatcttctcccccacgcccggggaactgggattctcctccttccacagactcttatctggaccctacttctggagcctcccttcacgcttcctgggggacaaggtgacctcctatggaggagagctgcgcttcacagtgacccagaggtcccagcygggctccacacccctgcacgggcagccgttggtggtgctgcaaggtaacaacatcatcctagagcaccatgtggcccaggagcccagccccggccagcccagcaccttcattgtgcctttccgggagcaagcatggcagcggcccgatgggcagccagccacacgggagcacctgctgatggcactggcaggcatcgacaccctcctgatccgagcatcctacgcccagcagcccrctgagagcagggtctctggcatcagcatggacgtggctgtgccygaggaaaccggccaggaccccgcrctggaagtggaacagtgctcctgcccacccgggtaccgtgggccgtcctgccaggactgtgacacaggctacacacgcacgcccagtggcctctacctgggtacctgtgaacgctgcagctgccatggccactcagaggcctgcgagccagaaacaggtgcctgccagggctgccagcatcacacggagggccctcrgtgtgagcagtgccagccaggatactacggggacgcccagcgggggacaccacaggactgccagctgtgcccctgctacggagaccctgctgccggccaggctgcccacacttgttttctggacacagacggccaccccacctgtgatgcgtgctccccaggccacagtgggcgtcactgtgagaggtgcgcccctggctactatggcaaccccagccagggccagccatgccagagagacagccaggtgccagggcccataggctgcaactgtgacccccaaggcagcrtcagcagccagtgtgatgctgctggtcagtgccagtgcaaggcccaggtrgaaggcctcacttgcagccactgccggccccaccacttccacctgagtgccagcaacccagacggctgcctgccctgcttctgtatgggcatcacccagcagtgcgccagctctgcctacacacgccacctgatctccacccactttgcccctggggacttccaaggctttgccctggtgaacccacagcgaaacagccgcctgacaggagaattcactgtggaacccgtgcccragggtgcccagctctcttttggcaactttgcccaactcggccaygagtccttctactggcagctgccggagacataccagggagacaaggtggcggcctacggtgggaagttgcgatacaccctctcctacacagcaggcccacagggcagcccactctctgaccccgatgtgcagatcacgggcaacaacatcatgctagtggcctcccagccagcgctgcagggccctgagaggaggagctacgagatcatgttccgagaggaattctggcgcyggcccgatgggcagccggccacacgcgagcacctcctgatggcactggccgacctggatgagctcctgatccgggccacgttctcctccgtgccgctggyggccagcatcagcgcagtcagcctggaggtcgcccagccggggccctcaaacagaccccgcgccctcgaggtggaggagtgccgctgcccgccaggctacatcggtctgtcctgccaggactgtgcccccggctacacgcgcaccgggagtgggctctacctcggccactgcgagctatgtgaatgcaatggccactcagacctgtgccacccagagactggggcctgctcgcaatgccagcacaacgccgcaggggagttctgcgagctttgtgcccctggctactacggagatgccacagccgggacgcctgaggactgccagccctgtgcctgcccactgaccaacccagagaacatgttttcccgcacctgtgagagcctgggagccggcgggtaccgctgcacggcctgcgaacccggctacactggccagtactgtgagcagtgtggcccaggttacgtgggtaaccccagtgtgcaagggggccagtgcctgccagagacaaaccaagccccactggtggtcgaggtccatcctgctcgaagcatagtgccccaaggtggctcccactccctgcggtgtcaggtcagtgggagcccaccccactacttctattggtcccgtgaggatgggcggcctgtgcccagcggcacccagcagcgacatcaaggctccgagctccacttccccagcgtccagccctcggatgctggggtctacatttgcacctgccgtaatctccaccaatccaataccagccgggcagagctgctggtcactgaggctccaagcaagcccatcacagtgactgtggaggagcagcggagccagagcgtgcgccccggagctgacgtcaccttcatctgcacagccaaaagcaagtccccagcctataccctggtgtggacccgcctgcacaacgggaaactgcccacccgagccatggatttcaatggcatcctgaccattcgcaacgtccagctgagtgatgcaggcacctacgtgtgcaccggctccaacatgtttgccatggaccagggcacagccactctacatgtgcaggcctcgggcaccttgtccgcccccgtggtctccatccatccgccacagctcacagtgcagcccgggcaactggcggagttccgctgcagcgccacagggagccccacgcccaccctcgagtggacagggggccccggcggccagctccctgcgaaggcacaaatccayggcggcatcctgyrcctgccagctgtcgagcccacggatcaggcccagtacttgtgccgagcccacagcagcgctgggcagcaggtggccagggctgtgctccacgtgcatgggggcggtgggcccagagtccaagtgagcccagagaggacccagrtccacgcaggccgcaccgtcaggctgtactgcagggctkcaggcgtgcctagcgccaccatcacctggaggaaggaagggggcagcctcccaccacaggcccggtcagagcgcacagacatcgcgacactgctcatcccagccatcacgactgctgacgccggcttctacctctgcgtggccaccagccctgcaggcactgcccaggcccggatccaagtggttgtcctttcagcctcagatgccagcccaccgccggtcaagattgagtcctcatcgccttctgtgacagaagggcaaacactcgacctcaactgtgtggkggcagggtcagcccatgcccaggtcacctggtacaggcgagggggtagcctgcctccccacacccaggtgcacggctcccgtctgcggctcccccaggtctcaccagctgattctggagaatatgtgtgccgtgtggagaatggatcgggccccaaggaggcctccattactgtgtctgtrctccacggcacccattctggccccagctacaccccagtgcccggcagcacccggcccatccgcatcgagccctcctcctcacacgtggcggaagggcagaccctggatctgaactgcgtggtgcccgggcaggcccacgcccaggtcacrtggcacaagcgtgggggcagcctccctgcccggcaccagacccacggctcgctgctgcggctgcaccaggtgaccccggccgactcaggcgagtatgtgtgccatgtggtgggcacctccrgccccctagaggcctcagtcctggtcaccatcgaagcctctgtcatccctggacccatcccacctgtcaggatcgagtcttcatcctccacagtggccgagggccagaccctggatctgagctgcgtggtggcagggcaggcccacgcccaggtcacatggtacaagcgtgggggcagcctccctgcccggcaccaggttcgtggctcccgcctgtacatcttccaggcctcacctgccgatgcgggacagtacgtctgccgggccagcaacggcatggaggcctccatcacggtcacagtaactgggacccagggggccaacttagcctaccctgccggcagcacccagcccatccgcatygagccctcctcctcgcaagtggcggaagggcagaccctggatctgaactgcgtggtgcccgggcagtcccatgcccaggtcacgtggcacaagcgtgggggcagcctccctgtccggcaccagacccacggctccctgctgagactctaccaagcrtcccccgccgactcgggcgagtacgtgtgccgagtgttgggcagctccgtgcctctagaggcctctgtcctggtcaccattgagcctgcgggctcagtgcctgcwcttggggtcacccccacggtccggatcgagtcatcgtcttcgcaagtggccgaggggcagaccctggacctgaactgcctcgttgctggtcaggcccatgcccaggtcacgtggcacaagcgcgggggcagcctcccggcccggcaccaggtgcatggctcgaggctacgcctgctccaggtgaccccagctgattcaggggagtacgtgtgycrtgtggtcggcagctcaggtayccaggaagcctcagtccttgtcaccatccagcagcgccttagtggctcccactcccagggtgtggcgtaccccgtccgcatcgagtcctcctcagcctccctggccaatggacacaccctggacctcaactgcctggttgccagccaggctccccacaccatcacctggtataagcgtggaggcagcttacccagccggcaccagatcgtgggctcccggctgcggatccctcaggtgactccggcagactcgggcgagtacgtgtgtcacgtmagtaacggtgcaggctcccgggagacctcgctcatcgtcaccatccagggcagcggttcctcccacgtgcccagcgtctccccaccgatcaggatcgagtcgtcttcccccacggtggtggaagggcagaccttggatctgaactgcgtggtcgccaggcagccccaggctatcatcacatggtacaagcgtgggggcagccttccctcccgacaccagacccatggctcccacctgcggttgcaccaaatgtctgtggctgactcgggcgagtatgtgtgccgggccaacaacaacatcgatgccctggaggcctccatcgtcatctccgtctcccctagcgccggcagcccctccgcccctggcagctccatgcccatcagaattgagtcatcctcctcacacgtggccgaaggggagaccctggatctgaactgcgtggtccccgggcaggcccatgcccaggtcacttggcacaagcgtgggggcagcctccccagtcaccatcagacccgcggctcacggctgcggctgcaccatgtgtccccggccgactcgggtgaatacgtgtgccgggtgatgggcagctctggccccctggaggcctcagtcctggtcaccatcraagcctctggctcaagtgctgtccacgtccccgccccaggtggagccccacccatccgcatcgagccctcctcctcccgagtggcagaagggcagaccctggatctgaagtgcgtggtgcccgggcaggcccacgcccaggtcacgtggcacaagcgtggaggaaacctccctgcccggcaccaggtccayggcccactgctgaggctgaaccaggtgtccccggctgactctggcgagtactcgtgccaagtgaccggaagctcaggcaccctggaggcatctgtcctggtcacaattgagccctccagcccaggacccattcctgctccaggactggcccagcccatctacatcgaggcctcctcttcacacgtgactgaagggcagactctggatctgaactgtgtggtgcccgggcaggcccatgcccaggtcacgtggtacaagcgcgggggcagcctccccgcccggcaccagacccatggctcccagctgcggctccaccwcrtctcccctgccgactcaggcgagtatgtgtgtcgtgcagccrgcggcccaggccctgagcaagaagcctccttcacagtcaccgtcccgcccagtgaggggtcttcctaccgccttaggagcccggtcatctccatcgacccgcccagcagcaccgtgcagcagggccagratgccagcttcaagtgcctcatccatgacggggcagcccccatcagcctcgagtggaagacccggaaccaggagctggaggacaacgtccacatcagtcccaatggctccatcatcaccatcgtgggcacccggcccagcaaccacggtacctaccgctgcgtggcctccaatgcctacggtgtggcccagagtgtggtgaacctcagtgtgcaygggccccctacagtgtccgtgctccccgagggccccgtgtgggtgaaagtgggaaaggctgtcaccctggagtgtgtcagtgccggggagccccgctcctctgctcgttggacccggatcagcagcacccctgccaagttggagcagcggacatatgggctcatggacagccacrcggtgctgcagatttcatcagctaaaccatcagatgcrggcacttatgtgtgccttgctcagaatgcactaggcacagcacagaagcaggtggaggtgatcgtggacacgggcgccatggccccaggggcccctcaggtccaagctgaagaagctgagctgactgtggaggctggacacacggccaccttgcgctgctcagccacaggcagccccgygcccaccatccactggtccaagctgcgttccccactgccctggcagyaccggctggaaggtgacacactcatcataccccgggtagcccagcaggactcgggccagtacatctgcaatgccactagccctgcygggcacgctgaggccaccatcatcctgcacgtggagagcccaccatatgccaccacggtcccagagcacgcttcggtgcaggcaggggagacggtgcagctccagtgcctggctcacgggacacccccactcaccttccagtggagccgcgtgggcagcagccttcctgggagggcgaccgccaggaacgagctgctgcactttgagcgtgcagcccctgaggactcaggccgctaccgctgccgggtcaccaacaaggtgggctcagccgaggcctttgcccagctgctcgtccaaggccctcccggctctctccctgccacctccatcccagcagggtccacgcccaccgtgcaggtcacgcctcagctagagaccaagagcattggggccagygttgagttccaytgtgctgtgcccagcgaccggggtacccagctccgttggttcaaggaagggggtcagctgcctccgggtcacagcgtgcaggatggggtgctccgaatccagaacttggaccagagctgccaagggacgtatatatgccaggcccatggaccttgggggaaggcccaggccagtgcccagctggttatccaagccctgccctcggtgctcatcaacatccggacctctgtgcagaccgtggtggttggccacgccgtggagttcgaatgcctggcactgggtgaccccaagcctcaggtgacatggagcaaagttggagggcacctgyggccaggcattgtgcagagcggaggtgtygtcaggatcgcccacgtagagctggctgatgcgggacagtatcgctgcactgccaccaacgcagctggcaccacacaatcccacgtcctgctgcttgtgcaagccttgccccagatctcaatgccccaagaagtccgtgtgcctgctggttctgcagctgtcttcccctgcatagcctcaggctaccccactcctgacatcagctggagcaagctggatggcagcctgccacytgacagccgcctggagaacaacatgctgatgctgccctcagtccraccccaggacgcaggtacctacrtctgcaccgccactaaccgccagggcaaggtcaaagcctttgcccacctgcaggtgccagagcgggtggtgccctacttcacgcagaccccctactccttcctaccgctgcccaccatcaaggatgcctacaggaagttcgagatcaagatcaccttccggccygactcagccgatgggatgctgctgtacaatgggcagaagcgagtcccagggagccccaccaacctggccaaccggcagcccgacttcatctccttcggcctcgtkgggggaaggcccgagttccggttcgatgcaggctcaggcatggccaccatccgccatcccacaccactggccctgggccatttccacaccgtgaccctgctgcgcagcctcacccagggctccctgattgtgggtgacctggccccggtcaaygggacctcccagggcaagttccagggcctggatctgaacgaggaactctacctgggtggctatcctgactatggtgccatccccaaggcggggctgagcagcggcttcataggctgtgtccgggagctgcgcatccagggcgaggagatcgtcttccatgacctcaacctcacggcgcacggcatctcccactgccccacctgtcgggaccggccctgccagaatggcggtcagtgccatgactctgagagcagcagctacgtgtgcgtctgcccagctggcttcaccgggagccgctgtgagcactcgcaggccctgcactgccatccagaggcctgtgggccsgaygccacctgtgtgaaccggcctgacggtcgaggctacacctgccgctgccacctgggccgctcggggttgcggtgtgaggaaggtgtgacagtgaccaccccctcgctgtcgggtgctggctcctacctggcactgcccgccctcaccaacacacaccacgagctacgcctggacgtggagttcaagccactcgcccctgacggggtcctgctgttcagcggggggaagagcgggcctgtggaggacttcgtgtccctggcgatggtgggyggccacctggagttccgctatgagttggggtcagggctggccgttctgcggagcgccgagccgctggccctgggccgctggcaccgtgtgtctgcagagcgtctcaacaaggacggcagcctgcgggtgaatggtggacgccctgtgctgcgctcctcgcccggcaagagccagggcctcaacctgcacaccctgctctacctggggggtgtggagccttccgtgccactgtccccggccaccaacatgagcgctcacttccgcggctgtgtgggcgaggtgtcagtgaatggcaaacggctggacctcacctacagtttcctaggcagccagggcatcgggcaatgctatgayagctccccatgtgagcgccagccttgccaacatggtgccacgtgcatgcccgctggcgagtatgagttccagtgcctgtgtcgagatggattcaaaggagacctgtgtgagcacgaggagaacccctgccagctccgtgaaccctgtctgcatgggggcacctgccagggcacccgctgcctctgcctccctggcttctctggcccacgctgccaacaaggctctggacatggcatagcagagtccgactggcatcttgaaggcagcgggggcaatgatgcccctgggcagtacggagcctatttccacgatgatggcttcctcgccttccctggccatgtcttctccaggagcctgcccgaggtgcccgagaccatcgagctggaggttcggaccagcacagccagtggcctcctgctctggcagggtgtggaggtgggagaggccggccaaggcaaggacttcatcagcctcgggcttcaagacgggcaccttgtcttcaggtaccagctgggtagtggggaggcccgcctggtctctgaggaccccatcaatgacggcgagtggcaccgggtgacagcactgcgggagggccgcagaggttccatccaagtcgacggtgaggagctggtcagcggcmggtscccaggtcccaacgtggcagtcaacgccaagggcarcrtctacatcggcggagcccctgacgtggccacgctgaccgggggcagattctcctcrggcatcacaggctgtgtcaagaacctggtgctgcactyggcccgacccggcgccccgcccccacagccyctggacctgcagcaccgcgcccaggccggggccaacacacgcccctgcccctcgtaggcacctgcctgccccacacggactcccgggccacgccccagcccgacaatgtcgagtatattattattaatattattatgaatttttgtaagaaaccgaggcgatgccacgctttgctgctmccgccctgggctggactggaggtgggcatgccaccctcacacacacagctgggcaaagccacaaggctggccagcaaggcaggttggatgggagtgggcacctcagaaagtcaccaggacttggggtcaggaacagtggctgggtgggcccagaastgcccccactgtccccctacccaccgatggagcccccagatagagctgggtggcctgtttctgcagcccttgggcagttctcactcctaggagagccaacctcggcttgtgggctggtgccccacagctacctgagacgggcatcgcaggagtctctgccacccactcaggattgggaattgtctttagtgccggctgtggagcaaaaggcagctcacccctgggaygcctggcctctgtgtcctagaagggaccctcctgtggtctttgtcttgatttttcttaataaacggtgctatccccgcca

SEQ ID NO: 94 - DNA, 13650 bp, Homo sapiens
cgtttgcttacaggtgacccatgggctgagggcatacgatggcttgtctctgcctgaggacatagagaccgtcacagcaagccaaatgcgctggacacattcgtacctttctgatgatgaggacatgctggctgacagcatctcaggagacgamctgggcagtggggacctgggcagcggggacttccagatggggagctggatggctgggtttttgtggagctsgatgtgggctcggaagggaatgcggatggkgctcagattcaggagatgctgctcagggtcatctccagcggctctgtggcctcctacgtcacctctccccagggattccagttccgacgcctgggcacagtgccccagttcccaagagcctgcacggaggccgagtttgcctgccacagctacaatgagtgtgtggccctggagtatcgctgtgaccggcggcccgactgcagggacatgtctgatgagctcaattgtgaggagccagtcctgggtatcagccccacattctctctcctygtggagacgacatctttaccgccccggccagagacaaccatcatgcgacagccaccagtcacccacgctcctcagcccctrcttcccggttccgtcaggcccctgccctgtgggcccmrggaggccgcatgccgcaatgggcactgcatccccagagactacctctgcgacggacaggaggactgcgaggacggcagcgatgagctagactgtggccccccgccaccctgtgagcccaacgagttcccctgcgggaatggacattgtgccctcaagctgtggcgctgcgatggtgactttgactgtgaggaccgaactgatgaagccaactgccccaccaagcgtcctgaggaagtgtgcgggcccacacagttccgatgcgtctctaccaacatgtgcatcccagccagcttccactgtgacgaggagagcgactgtcctgaccggagcgacgagtttggctgcatgcccccccaggtggtgacacctccccgggagtccatccaggcttcccggggccagacagtgaccttcacctgcgtggccattggcgtccccacccccatcatcaattggaggctcaactggggccacatcccctctcatcccagggtgacagtgaccagcgagggtggccgtggcacactgatcatccgtgatgtgaaggagtcagaccagggtgcctacacctgtgaggccatgaacgcccggggcatggtgtttggcattcctgacggtgtccttgagctcgtcccacaacgaggcccctgccctgacggccacttctacctggagcacagcgccgcctgcctgccctgcttctgctttggcatcaccagcgtgtgccagagcacccgccgcttccgggaccagatcaggctgcgctttgaccaacccgatgacttcaagggtgtgaatgtgacaatgcctgcgcagcccggcacgccacccctctcctccacgcagctgcagatcgacccatccctgcacgagttccagctagtcgacctgtcccgccgcttcctcgtccaygactccttctgggctctgcctgaacagttcctgggcaacaaggtggactcctatggcggctccctgcgttacaacgtgcgctacgagttggcccgtggcatgctggagccagtgcagcggccggacgtggtcctcrtgggtgccgggtaccgcctcctctcccgaggccacacacccacccamcctggtgctctgaaccagcgccaggtccagttctctgaggagcactgggtccatgagtctggccggccggtgcagcgcgcggagctgctgcaggtgctgcagagcctggaggccgtgctcatccagaccgtgtacaacaccaagatggcyagcgtgggacttagcgacatcgccatggataccaccgtcacccatgccaccagccatggccgtgcccacagtgtggaggagtgcaggtgcctgagccggcagggctgggaaccacagagaccctagcaaggatagaggagaaacggcagggcctcaccgtccttgcagcgactcttttggtcctgtccccacagatgccccattggctattctggcttgtcctgcgagagctgtgatgcccacttcactcgggtgcctggtgggccctacctgggcacctgctctggttgcarttgcaatggccatgccagctcctgtgaccctgtgtatggccactgcctgaattgccagcacaacacggaggggccacagtgcaacaagtgcaaggctggcttctttggggacgccatgaaggccacggccacttcctgccggccctgcccttgcccatacatcgatgcctcccgcagattctcagacacttgcttcctggacacggatggccaagccacatgtgacgcctgtgccccaggctacactggccgccgctgtgagagctgtgcccccggatacgagggcaaccccatccagcccrgcgggaagtgcaggcccgtcaaccaggagattgtgcgctgtgacgagcgtggcagcatggggacctccggggaggcctgccgctgtaagaacaatgtggtggggcgcttgtgcaatgaatgtgctgacggctctttccacctgagtacccgaaaccccgatggctgcctcaagtgcttctgcatgggtgtcagtcgccactgcaccagctcttcatggagccgtgcccagttgcatggggcctctgaggagcctggtcacttcagcctgaccmacgccgcaagcacccacaccaccaacgagggcatcttctcccccacgcccggggaactgggattctcctccttccacagactcttatctggaccctacttctggagcctcccttcacgcttcctgggggacaaggtgacctcctatggaggagagctgcgcttcacagtgacccagaggtcccagcygggctccacacccctgcacgggcagccgttggtggtgctgcaaggtaacaacatcatcctagagcaccatgtggcccaggagcccagccccggccagcccagcaccttcattgtgcctttccgggagcaagcatggcagcggcccgatgggcagccagccacacgggagcacctgctgatggcactggcaggcatcgacaccctcctgatccgagcatcctacgcccagcagcccrctgagagcagggtctctggcatcagcatggacgtggctgtgccygaggaaaccggccaggaccccgcrctggaagtggaacagtgctcctgcccacccgggtaccgtgggccgtcctgccaggactgtgacacaggctacacacgcacgcccagtggcctctacctgggtacctgtgaacgctgcagctgccatggccactcagaggcctgcgagccagaaacaggtgcctgccagggctgccagcatcacacggagggccctcrgtgtgagcagtgccagccaggatactacggggacgcccagcgggggacaccacaggactgccagctgtgcccctgctacggagaccctgctgccggccaggctgcccacacttgttttctggacacagacggccaccccacctgtgatgcgtgctccccaggccacagtgggcgtcactgtgagaggtgcgcccctggctactatggcaaccccagccagggccagccatgccagagagacagccaggtgccagggcccataggctgcaactgtgacccccaaggcagcrtcagcagccagtgtgatgctgctggtcagtgccagtgcaaggcccaggtrgaaggcctcacttgcagccactgccggccccaccacttccacctgagtgccagcaacccagacggctgcctgccctgcttctgtatgggcatcacccagcagtgcgccagctctgcctacacacgccacctgatctccacccactttgcccctggggacttccaaggctttgccctggtgaacccacagcgaaacagccgcctgacaggagaattcactgtggaacccgtgcccragggtgcccagctctcttttggcaactttgcccaactcggccaygagtccttctactggcagctgccggagacataccagggagacaaggtggcggcctacggtgggaagttgcgatacaccctctcctacacagcaggcccacagggcagcccactctctgaccccgatgtgcagatcacgggcaacaacatcatgctagtggcctcccagccagcgctgcagggccctgagaggaggagctacgagatcatgttccgagaggaattctggcgcyggcccgatgggcagccggccacacgcgagcacctcctgatggcactggccgacctggatgagctcctgatccgggccacgttctcctccgtgccgctggyggccagcatcagcgcagtcagcctggaggtcgcccagccggggccctcaaacagaccccgcgccctcgaggtggaggagtgccgctgcccgccaggctacatcggtctgtcctgccaggactgtgcccccggctacacgcgcaccgggagtgggctctacctcggccactgcgagctatgtgaatgcaatggccactcagacctgtgccacccagagactggggcctgctcgcaatgccagcacaacgccgcaggggagttctgcgagctttgtgcccctggctactacggagatgccacagccgggacgcctgaggactgccagccctgtgcctgcccactgaccaacccagagaacatgttttcccgcacctgtgagagcctgggagccggcgggtaccgctgcacggcctgcgaacccggctacactggccagtactgtgagcagtgtggcccaggttacgtgggtaaccccagtgtgcaagggggccagtgcctgccagagacaaaccaagccccactggtggtcgaggtccatcctgctcgaagcatagtgccccaaggtggctcccactccctgcggtgtcaggtcagtgggagcccaccccactacttctattggtcccgtgaggatgggcggcctgtgcccagcggcacccagcagcgacatcaaggctccgagctccacttccccagcgtccagccctcggatgctggggtctacatttgcacctgccgtaatctccaccaatccaataccagccgggcagagctgctggtcactgaggctccaagcaagcccatcacagtgactgtggaggagcagcggagccagagcgtgcgccccggagctgacgtcaccttcatctgcacagccaaaagcaagtccccagcctataccctggtgtggacccgcctgcacaacgggaaactgcccacccgagccatggatttcaatggcatcctgaccattcgcaacgtccagctgagtgatgcaggcacctacgtgtgcaccggctccaacatgtttgccatggaccagggcacagccactctacatgtgcaggcctcgggcaccttgtccgcccccgtggtctccatccatccgccacagctcacagtgcagcccgggcaactggcggagttccgctgcagcgccacagggagccccacgcccaccctcgagtggacagggggccccggcggccagctccctgcgaaggcacaaatccayggcggcatcctgyrcctgccagctgtcgagcccacggatcaggcccagtacttgtgccgagcccacagcagcgctgggcagcaggtggccagggctgtgctccacgtgcatgggggcggtgggcccagagtccaagtgagcccagagaggacccagrtccacgcaggccgcaccgtcaggctgtactgcagggctkcaggcgtgcctagcgccaccatcacctggaggaaggaagggggcagcctcccaccacaggcccggtcagagcgcacagacatcgcgacactgctcatcccagccatcacgactgctgacgccggcttctacctctgcgtggccaccagccctgcaggcactgcccaggcccggatccaagtggttgtcctttcagcctcagatgccagcccaccgccggtcaagattgagtcctcatcgccttctgtgacagaagggcaaacactcgacctcaactgtgtggkggcagggtcagcccatgcccaggtcacctggtacaggcgagggggtagcctgcctccccacacccaggtgcacggctcccgtctgcggctcccccaggtctcaccagctgattctggagaatatgtgtgccgtgtggagaatggatcgggccccaaggaggcctccattactgtgtctgtrctccacggcacccattctggccccagctacaccccagtgcccggcagcacccggcccatccgcatcgagccctcctcctcacacgtggcggaagggcagaccctggatctgaactgcgtggtgcccgggcaggcccacgcccaggtcacrtggcacaagcgtgggggcagcctccctgcccggcaccagacccacggctcgctgctgcggctgcaccaggtgaccccggccgactcaggcgagtatgtgtgccatgtggtgggcacctccrgccccctagaggcctcagtcctggtcaccatcgaagcctctgtcatccctggacccatcccacctgtcaggatcgagtcttcatcctccacagtggccgagggccagaccctggatctgagctgcgtggtggcagggcaggcccacgcccaggtcacatggtacaagcgtgggggcagcctccctgcccggcaccaggttcgtggctcccgcctgtacatcttccaggcctcacctgccgatgcgggacagtacgtctgccgggccagcaacggcatggaggcctccatcacggtcacagtaactgggacccagggggccaacttagcctaccctgccggcagcacccagcccatccgcatygagccctcctcctcgcaagtggcggaagggcagaccctggatctgaactgcgtggtgcccgggcagtcccatgcccaggtcacgtggcacaagcgtgggggcagcctccctgtccggcaccagacccacggctccctgctgagactctaccaagcrtcccccgccgactcgggcgagtacgtgtgccgagtgttgggcagctccgtgcctctagaggcctctgtcctggtcaccattgagcctgcgggctcagtgcctgcwcttggggtcacccccacggtccggatcgagtcatcgtcttcgcaagtggccgaggggcagaccctggacctgaactgcctcgttgctggtcaggcccatgcccaggtcacgtggcacaagcgcgggggcagcctcccggcccggcaccaggtgcatggctcgaggctacgcctgctccaggtgaccccagctgattcaggggagtacgtgtgycrtgtggtcggcagctcaggtayccaggaagcctcagtccttgtcaccatccagcagcgccttagtggctcccactcccagggtgtggcgtaccccgtccgcatcgagtcctcctcagcctccctggccaatggacacaccctggacctcaactgcctggttgccagccaggctccccacaccatcacctggtataagcgtggaggcagcttacccagccggcaccagatcgtgggctcccggctgcggatccctcaggtgactccggcagactcgggcgagtacgtgtgtcacgtmagtaacggtgcaggctcccgggagacctcgctcatcgtcaccatccagggcagcggttcctcccacgtgcccagcgtctccccaccgatcaggatcgagtcgtcttcccccacggtggtggaagggcagaccttggatctgaactgcgtggtcgccaggcagccccaggctatcatcacatggtacaagcgtgggggcagccttccctcccgacaccagacccatggctcccacctgcggttgcaccaaatgtctgtggctgactcgggcgagtatgtgtgccgggccaacaacaacatcgatgccctggaggcctccatcgtcatctccgtctcccctagcgccggcagcccctccgcccctggcagctccatgcccatcagaattgagtcatcctcctcacacgtggccgaaggggagaccctggatctgaactgcgtggtccccgggcaggcccatgcccaggtcacttggcacaagcgtgggggcagcctccccagtcaccatcagacccgcggctcacggctgcggctgcaccatgtgtccccggccgactcgggtgaatacgtgtgccgggtgatgggcagctctggccccctggaggcctcagtcctggtcaccatcraagcctctggctcaagtgctgtccacgtccccgccccaggtggagccccacccatccgcatcgagccctcctcctcccgagtggcagaagggcagaccctggatctgaagtgcgtggtgcccgggcaggcccacgcccaggtcacgtggcacaagcgtggaggaaacctccctgcccggcaccaggtccayggcccactgctgaggctgaaccaggtgtccccggctgactctggcgagtactcgtgccaagtgaccggaagctcaggcaccctggaggcatctgtcctggtcacaattgagccctccagcccaggacccattcctgctccaggactggcccagcccatctacatcgaggcctcctcttcacacgtgactgaagggcagactctggatctgaactgtgtggtgcccgggcaggcccatgcccaggtcacgtggtacaagcgcgggggcagcctccccgcccggcaccagacccatggctcccagctgcggctccaccwcrtctcccctgccgactcaggcgagtatgtgtgtcgtgcagccrgcggcccaggccctgagcaagaagcctccttcacagtcaccgtcccgcccagtgaggggtcttcctaccgccttaggagcccggtcatctccatcgacccgcccagcagcaccgtgcagcagggccagratgccagcttcaagtgcctcatccatgacggggcagcccccatcagcctcgagtggaagacccggaaccaggagctggaggacaacgtccacatcagtcccaatggctccatcatcaccatcgtgggcacccggcccagcaaccacggtacctaccgctgcgtggcctccaatgcctacggtgtggcccagagtgtggtgaacctcagtgtgcaygggccccctacagtgtccgtgctccccgagggccccgtgtgggtgaaagtgggaaaggctgtcaccctggagtgtgtcagtgccggggagccccgctcctctgctcgttggacccggatcagcagcacccctgccaagttggagcagcggacatatgggctcatggacagccacrcggtgctgcagatttcatcagctaaaccatcagatgcrggcacttatgtgtgccttgctcagaatgcactaggcacagcacagaagcaggtggaggtgatcgtggacacgggcgccatggccccaggggcccctcaggtccaagctgaagaagctgagctgactgtggaggctggacacacggccaccttgcgctgctcagccacaggcagccccgygcccaccatccactggtccaagctgcgttccccactgccctggcagyaccggctggaaggtgacacactcatcataccccgggtagcccagcaggactcgggccagtacatctgcaatgccactagccctgcygggcacgctgaggccaccatcatcctgcacgtggagagcccaccatatgccaccacggtcccagagcacgcttcggtgcaggcaggggagacggtgcagctccagtgcctggctcacgggacacccccactcaccttccagtggagccgcgtgggcagcagccttcctgggagggcgaccgccaggaacgagctgctgcactttgagcgtgcagcccctgaggactcaggccgctaccgctgccgggtcaccaacaaggtgggctcagccgaggcctttgcccagctgctcgtccaaggccctcccggctctctccctgccacctccatcccagcagggtccacgcccaccgtgcaggtcacgcctcagctagagaccaagagcattggggccagygttgagttccaytgtgctgtgcccagcgaccggggtacccagctccgttggttcaaggaagggggtcagctgcctccgggtcacagcgtgcaggatggggtgctccgaatccagaacttggaccagagctgccaagggacgtatatatgccaggcccatggaccttgggggaaggcccaggccagtgcccagctggttatccaagccctgccctcggtgctcatcaacatccggacctctgtgcagaccgtggtggttggccacgccgtggagttcgaatgcctggcactgggtgaccccaagcctcaggtgacatggagcaaagttggagggcacctgyggccaggcattgtgcagagcggaggtgtygtcaggatcgcccacgtagagctggctgatgcgggacagtatcgctgcactgccaccaacgcagctggcaccacacaatcccacgtcctgctgcttgtgcaagccttgccccagatctcaatgccccaagaagtccgtgtgcctgctggttctgcagctgtcttcccctgcatagcctcaggctaccccactcctgacatcagctggagcaagctggatggcagcctgccacytgacagccgcctggagaacaacatgctgatgctgccctcagtccraccccaggacgcaggtacctacrtctgcaccgccactaaccgccagggcaaggtcaaagcctttgcccacctgcaggtgccagagcgggtggtgccctacttcacgcagaccccctactccttcctaccgctgcccaccatcaaggatgcctacaggaagttcgagatcaagatcaccttccggccygactcagccgatgggatgctgctgtacaatgggcagaagcgagtcccagggagccccaccaacctggccaaccggcagcccgacttcatctccttcggcctcgtkgggggaaggcccgagttccggttcgatgcaggctcaggcatggccaccatccgccatcccacaccactggccctgggccatttccacaccgtgaccctgctgcgcagcctcacccagggctccctgattgtgggtgacctggccccggtcaaygggacctcccagggcaagttccagggcctggatctgaacgaggaactctacctgggtggctatcctgactatggtgccatccccaaggcggggctgagcagcggcttcataggctgtgtccgggagctgcgcatccagggcgaggagatcgtcttccatgacctcaacctcacggcgcacggcatctcccactgccccacctgtcgggaccggccctgccagaatggcggtcagtgccatgactctgagagcagcagctacgtgtgcgtctgcccagctggcttcaccgggagccgctgtgagcactcgcaggccctgcactgccatccagaggcctgtgggccsgaygccacctgtgtgaaccggcctgacggtcgaggctacacctgccgctgccacctgggccgctcggggttgcggtgtgaggaaggtgtgacagtgaccaccccctcgctgtcgggtgctggctcctacctggcactgcccgccctcaccaacacacaccacgagctacgcctggacgtggagttcaagccactcgcccctgacggggtcctgctgttcagcggggggaagagcgggcctgtggaggacttcgtgtccctggcgatggtgggyggccacctggagttccgctatgagttggggtcagggctggccgttctgcggagcgccgagccgctggccctgggccgctggcaccgtgtgtctgcagagcgtctcaacaaggacggcagcctgcgggtgaatggtggacgccctgtgctgcgctcctcgcccggcaagagccagggcctcaacctgcacaccctgctctacctggggggtgtggagccttccgtgccactgtccccggccaccaacatgagcgctcacttccgcggctgtgtgggcgaggtgtcagtgaatggcaaacggctggacctcacctacagtttcctaggcagccagggcatcgggcaatgctatgayagctccccatgtgagcgccagccttgccaacatggtgccacgtgcatgcccgctggcgagtatgagttccagtgcctgtgtcgagatggattcaaaggagacctgtgtgagcacgaggagaacccctgccagctccgtgaaccctgtctgcatgggggcacctgccagggcacccgctgcctctgcctccctggcttctctggcccacgctgccaacaaggctctggacatggcatagcagagtccgactggcatcttgaaggcagcgggggcaatgatgcccctgggcagtacggagcctatttccacgatgatggcttcctcgccttccctggccatgtcttctccaggagcctgcccgaggtgcccgagaccatcgagctggaggttcggaccagcacagccagtggcctcctgctctggcagggtgtggaggtgggagaggccggccaaggcaaggacttcatcagcctcgggcttcaagacgggcaccttgtcttcaggtaccagctgggtagtggggaggcccgcctggtctctgaggaccccatcaatgacggcgagtggcaccgggtgacagcactgcgggagggccgcagaggttccatccaagtcgacggtgaggagctggtcagcggcmggtscccaggtcccaacgtggcagtcaacgccaagggcarcrtctacatcggcggagcccctgacgtggccacgctgaccgggggcagattctcctcrggcatcacaggctgtgtcaagaacctggtgctgcactyggcccgacccggcgccccgcccccacagccyctggacctgcagcaccgcgcccaggccggggccaacacacgcccctgcccctcgtaggcacctgcctgccccacacggactcccgggccacgccccagcccgacaatgtcgagtatattattattaatattattatgaatttttgtaagaaaccgaggcgatgccacgctttgctgctmccgccctgggctggactggaggtgggcatgccaccctcacacacacagctgggcaaagccacaaggctggccagcaaggcaggttggatgggagtgggcacctcagaaagtcaccaggacttggggtcaggaacagtggctgggtgggcccagaastgcccccactgtccccctacccaccgatggagcccccagatagagctgggtggcctgtttctgcagcccttgggcagttctcactcctaggagagccaacctcggcttgtgggctggtgccccacagctacctgagacgggcatcgcaggagtctctgccacccactcaggattgggaattgtctttagtgccggctgtggagcaaaaggcagctcacccctgggaygcctggcctctgtgtcctagaagggaccctcctgtggtctttgtcttgatttttcttaataaacggtgctatccccgcca

SEQ ID NO: 95 - DNA, 1492 bp, Homo sapiens
aacatatagtaacatagtgtggtactttgtcttgaggagatgtcctggactcacacggaaacttagggctacggaatgaagacgccaaggatggtggtcatggcrccccgaaccctcttcctgctrctctcgggggccctgaccctgaccgagacctgggcgggctcccactccatgaggtatttcagcgccgccgtgtcccggcccggccgcggggagccccgcttcatcgccatgggctacgtggacgacwcgcarttcgtgcggttcgacagcgactcggcgtgtccgaggatggagccgcgggcgccgtgggtggagcaggaggggccrgagtattgggaagaggagacacggaacaccaaggcccacgcacagactgacagaatgaacctgcagaccctgcgcggctactacaaccagagcgaggccagttctcayaccctccagtggatgattggytgcgacctggkgtccgacggwcgcctcmtccgcgggtatgaacagtatgcctacgatggcaaggattacctcgccctgaacgaggacctgcgctcctggaccgcagcggacactgcggctcagatctccaagcgcaagtgtgargcggccaatgtggctgaacaaaggagagcctacctggagggcacgtgcgtggagtggctccacagatacctggagaacgggaaggagatgctgcagcgcgcggacccccccaagacacaygtgacccaccaccctgtctttgactatgaggccaccctgaggtgctgggccctgggcttctaccctgcggagatcatactgacctggcagcgggatggggaggaccagacccaggacgtggagctcgtggagaccaggcctgcaggggatggaaccttccagaagtgggcagctgtggtggtgccttctggagaggagcagagatacayrtgccatgtgcagcatgaggggctgccrgagcccctcatgctgagatggaagcagtcttccctgcccaccatccccatcatgggtatcgttgctggyctggttgtccttgcagctgtagtcactggagctgcggtcgctgctgtgctgtggagraagaagagctcagattgaaaaggagggagctactctcaggctgcaatgtgaaacagctgccctgtgtgggactgagtggcaagtccctttgtgacttcaagaaccctgactyctctttstgcagagaccagcccacccctgtgcccaccatgaccctcttcctcatgctgaactgcattccttccccaatcacctttcctgttccagaaaaggggctgggatgtctccgtctctgtctcaaatttgtggtscactgagctataacttacttctgtattaaaattagaatctgagtrtaaatttastttttcaaattatttccaagagagattgatdggttaattaaaggagaagattcctgaaatttgagagacaaaataaatggaagacatgagaactttcc

SEQ ID NO: 96 - DNA, 1842 bp, Homo sapiens
cccattaggtgacaggtttttagagaagccaatcagcgtcgccgcggtyctggttctaaagtcctcgctcacccacccggactcattctccccagacgccaaggatggtggtcatggcrccccgaaccctcttcctgctrctctcgggggccctgaccctgaccgagacctgggcgggctcccactccatgaggtatttcagcgccgccgtgtcccggcccggccgcggggagccccgcttcatcgccatgggctacgtggacgacwcgcarttcgtgcggttcgacagcgactcggcgtgtccgaggatggagccgcgggcgccgtgggtggagcaggaggggccrgagtattgggaagaggagacacggaacaccaaggcccacgcacagactgacagaatgaacctgcagaccctgcgcggctactacaaccagagcgaggccagttctcayaccctccagtggatgattggytgcgacctggkgtccgacggwcgcctcmtccgcgggtatgaacagtatgcctacgatggcaaggattacctcgccctgaacgaggacctgcgctcctggaccgcagcggacactgcggctcagatctccaagcgcaagtgtgargcggccaatgtggctgaacaaaggagagcctacctggagggcacgtgcgtggagtggctccacagatacctggagaacgggaaggagatgctgcagcgcgcggacccccccaagacacaygtgacccaccaccctgtctttgactatgaggccaccctgaggtgctgggccctgggcttctaccctgcggagatcatactgacctggcagcgggatggggaggaccagacccaggacgtggagctcgtggagaccaggcctgcaggggatggaaccttccagaagtgggcagctgtggtggtgccttctggagaggagcagagatacayrtgccatgtgcagcatgaggggctgccrgagcccctcatgctgagatggaagcagtcttccctgcccaccatccccatcatgggtatcgttgctggyctggttgtccttgcagctgtagtcactggagctgcggtcgctgctgtgctgtggagraagaagagctcagattgaaaaggagggagctactctcaggctgcaagtaagtatgaaggaggctgatccctgagatccttgggatcttgtgtttgggagcccatgggggagctcacccaccccacaattcctcctctggccacatctcctgtggtctctgaccaggtgctgtttttgttctactctaggcagtgacagtgcccagggctctaatgtgtctctcacggcttgtaaatgtgacaccccggggggcctgatgtgtgtgggttgttgagggvaacagbggacatagctgtgctatgaggtttctttgacttsaatgtattgagcatgtgatgggctgtttaaagtgtcacccctcactgtgactgatatgaatttgttcatgaatatttttctgtagtgtgaaacagctgccctgtgtgggactgagtggcaagtccctttgtgacttcaagaaccctgactyctctttstgcagagaccagcccacccctgtgcccaccatgaccctcttcctcatgctgaactgcattccttccccaatcacctttcctgttccagaaaaggggctgggatgtctccgtctctgtctcaaatttgtggtscactgagctataacttacttctgtattaaaattagaatctgagtrtaaatttastttttcaaattatttccaagagagattgatdggttaattaaaggagaagattcctgaaatttgagagacaaaataaa

SEQ ID NO: 97 - DNA, 357 bp, Homo sapiens
gccgtgtcccggcccggccgcggggagccccgcttcatcgccatgggctacgtggacgacwcgcarttcgtgcggttcgacagcgactcggcgtgtccgaggatggagccgcgggcgccgtgggtggagcaggaggggccrgagtattgggaagaggagacacggaacaccaaggcccacgcacagactgacagaatgaacctgcagaccctgcgcggctactacaaccagagcgaggccaagcagtcttccctgcccaccatccccatcatgggtatcgttgctggyctggttgtccttgcagctgtagtcactggagctgcggtcgctgctgtgctgtggagraagaagagctca

SEQ ID NO: 98 - DNA, 549 bp, Homo sapiens
aacatatagtaacatagtgtggtactttgtcttgaggagatgtcctggactcacacggaaacttagggctacggaatgaagacgccaaggatggtggtcatggcrccccgaaccctcttcctgctrctctcgggggccctgaccctgaccgagacctgggcgggctcccactccatgaggtatttcagcgccgccgtgtcccggcccggccgcggggagccccgcttcatcgccatgggctacgtggacgacwcgcarttcgtgcggttcgacagcgactcggcgtgtccgaggatggagccgcgggcgccgtgggtggagcaggaggggccrgagtattgggaagaggagacacggaacaccaaggcccacgcacagactgacagaatgaacctgcagaccctgcgcggctactacaaccagagcgaggccaagcagtcttccctgcccaccatccccatcatgggtatcgttgctggyctggttgtccttgcagctgtagtcactggagctgcggtcgctgctgtgctgtggagraagaagagctca

SEQ ID NO: 99 - DNA, 937 bp, Homo sapiens
gccgtgtcccggcccggccgcggggagccccgcttcatcgccatgggctacgtggacgacwcgcarttcgtgcggttcgacagcgactcggcgtgtccgaggatggagccgcgggcgccgtgggtggagcaggaggggccrgagtattgggaagaggagacacggaacaccaaggcccacgcacagactgacagaatgaacctgcagaccctgcgcggctactacaaccagagcgaggccaagatcatactgacctggcagcgggatggggaggaccagacccaggacgtggagctcgtggagaccaggcctgcaggggatggaaccttccagaagtgggcagctgtggtggtgccttctggagaggagcagagatacayrtgccatgtgcagcatgaggggctgccrgagcccctcatgctgagatggaagcagtcttccctgcccaccatccccatcatgggtatcgttgctggyctggttgtccttgcagctgtagtcactggagctgcggtcgctgctgtgctgtggagraagaagagctcagattgaaaaggagggagctactctcaggctgcaatgtgaaacagctgccctgtgtgggactgagtggcaagtccctttgtgacttcaagaaccctgactyctctttstgcagagaccagcccacccctgtgcccaccatgaccctcttcctcatgctgaactgcattccttccccaatcacctttcctgttccagaaaaggggctgggatgtctccgtctctgtctcaaatttgtggtscactgagctataacttacttctgtattaaaattagaatctgagtrtaaatttastttttcaaattatttccaagagagattgatdggttaattaaaggagaagattcctgaaatttgagagacaaaataaatggaagacatgagaactttcc

SEQ ID NO: 100 - DNA, 1216 bp, Homo sapiens
aacatatagtaacatagtgtggtactttgtcttgaggagatgtcctggactcacacggaaacttagggctacggaatgaagacgccaaggatggtggtcatggcrccccgaaccctcttcctgctrctctcgggggccctgaccctgaccgagacctgggcgggctcccactccatgaggtatttcagcgccgccgtgtcccggcccggccgcggggagccccgcttcatcgccatgggctacgtggacgacwcgcarttcgtgcggttcgacagcgactcggcgtgtccgaggatggagccgcgggcgccgtgggtggagcaggaggggccrgagtattgggaagaggagacacggaacaccaaggcccacgcacagactgacagaatgaacctgcagaccctgcgcggctactacaaccagagcgaggccaacccccccaagacacaygtgacccaccaccctgtctttgactatgaggccaccctgaggtgctgggccctgggcttctaccctgcggagatcatactgacctggcagcgggatggggaggaccagacccaggacgtggagctcgtggagaccaggcctgcaggggatggaaccttccagaagtgggcagctgtggtggtgccttctggagaggagcagagatacayrtgccatgtgcagcatgaggggctgccrgagcccctcatgctgagatggaagcagtcttccctgcccaccatccccatcatgggtatcgttgctggyctggttgtccttgcagctgtagtcactggagctgcggtcgctgctgtgctgtggagraagaagagctcagattgaaaaggagggagctactctcaggctgcaatgtgaaacagctgccctgtgtgggactgagtggcaagtccctttgtgacttcaagaaccctgactyctctttstgcagagaccagcccacccctgtgcccaccatgaccctcttcctcatgctgaactgcattccttccccaatcacctttcctgttccagaaaaggggctgggatgtctccgtctctgtctcaaatttgtggtscactgagctataacttacttctgtattaaaattagaatctgagtrtaaatttastttttcaaattatttccaagagagattgatdggttaattaaaggagaagattcctgaaatttgagagacaaaataaatggaagacatgagaactttcc

SEQ ID NO: 101 - DNA, 868 bp, Homo sapiens
attaggagatgtcctggactcacacagaaactcagggctatggaatgaagggcaagctcactctctggcaacaagctccctggvgtgatttttcttctagaagagtccacggggacagggtttctcttctccctctcccaacctgtgtcgggtccttcttcctggmtactcaccmggctgccccagttctcactcccattgagtgtcgggttyctagagaagccaatcaatgtagccgcggtcccggttctaaagttcccacgcacccaccgggactccgattctycccagtcgccgaggatggtgtcatggcgccccgaaccctgcttctgctgctctcgggggccctggtcctgacccagacctgggcaggcttccactccttgaggtatttccacaccaccatgtcccggcccggccgcgcggatccccgcttcctctccgtgggcgacgtggacgacacgcagtgcgtgcgsctcgacagcgacgccacgagtcccaggatggagcmggaggggccggaatattgggaagaggagacagggaccgccaaggccaaagcacagttttaccgagtgaacctgcggaccctgagcggcyactacaaccagagtgaggcctgtgagtgacaccggccgggggcgcagvtcactacccstcyacatcccccacgraccgcccgggtctccccgagtctctgggtccgagatccacgccgaggcagcggvacctggagacccttbacccgggagaggcccaggagccgttacccggtttcattttcagccaaaatccccgcaggggctgccagccacacagagtcatggacaggtctctacagacacaacttagtgccagcttggatgaa

SEQ ID NO: 102 - DNA, 729 bp, Homo sapiens
atggcgccccgaaccctgcttctgctgctctcgggggccctggtcctgacccagacctgggcaggctcccactccatgaggtatttcagcgccgccgtgtcccggcccggccgcggggagccccgcttcatcgccatgggctacgtggacgacwcgcarttcgtgcggttcgacagcgactcggcgtgtccgaggatggagccgcgggcgccgtgggtggagcaggaggggccrgagtattgggaagaggagacacggaacaccaaggcccacgcacagactgacagaatgaacctgcagaccctgcgcggctactacaaccagagcgaggccagttctcayaccctccagtggatgattggytgcgacctggkgtccgacggwcgcctcmtccgcgggtatgaacagtatgcctacgatggcaaggattacctcgccctgaacgaggacctgcgctcctggaccgcagcggacactgcggctcagatctccaagcgcaagtgtgargcggccaatgtggctgaacaaaggagagcctacctggagggcacgtgcgtggagtggctccacagatacctggagaacgggaaggagatgctgcagcgcgcggggccatcttcccagcccacattccycatcrtgggcatygttacygtcctggttgttctaggtgctgtggtcactgctgtgatgtggaagaataagaccccaggtaggaaaggggtgagt

SEQ ID NO: 103 - DNA, 1024 bp, Homo sapiens
gccgtgtcccggcccggccgcggggagccccgcttcatcgccatgggctacgtggacgacwcgcarttcgtgcggttcgacagcgactcggcgtgtccgaggatggagccgcgggcgccgtgggtggagcaggaggggccrgagtattgggaagaggagacacggaacaccaaggcccacgcacagactgacagaatgaacctgcagaccctgcgcggctactacaaccagagcgaggccaacccccccaagacacaygtgacccaccaccctgtctttgactatgaggccaccctgaggtgctgggccctgggcttctaccctgcggagatcatactgacctggcagcgggatggggaggaccagacccaggacgtggagctcgtggagaccaggcctgcaggggatggaaccttccagaagtgggcagctgtggtggtgccttctggagaggagcagagatacayrtgccatgtgcagcatgaggggctgccrgagcccctcatgctgagatggaagcagtcttccctgcccaccatccccatcatgggtatcgttgctggyctggttgtccttgcagctgtagtcactggagctgcggtcgctgctgtgctgtggagraagaagagctcagattgaaaaggagggagctactctcaggctgcaatgtgaaacagctgccctgtgtgggactgagtggcaagtccctttgtgacttcaagaaccctgactyctctttstgcagagaccagcccacccctgtgcccaccatgaccctcttcctcatgctgaactgcattccttccccaatcacctttcctgttccagaaaaggggctgggatgtctccgtctctgtctcaaatttgtggtscactgagctataacttacttctgtattaaaattagaatctgagtrtaaatttastttttcaaattatttccaagagagattgatdggttaattaaaggagaagattcctgaaatttgagagacaaaataaatggaagacatgagaactttcc

SEQ ID NO: 104 - DNA, 1506 bp, Homo sapiens
cccattaggtgacaggtttttagagaagccaatcagcgtcgccgcggtyctggttctaaagtcctcgctcacccacccggactcattctccccagacgccaaggatggtggtcatggcrccccgaaccctcttcctgctrctctcgggggccctgaccctgaccgagacctgggcgggctcccactccatgaggtatttcagcgccgccgtgtcccggcccggccgcggggagccccgcttcatcgccatgggctacgtggacgacwcgcarttcgtgcggttcgacagcgactcggcgtgtccgaggatggagccgcgggcgccgtgggtggagcaggaggggccrgagtattgggaagaggagacacggaacaccaaggcccacgcacagactgacagaatgaacctgcagaccctgcgcggctactacaaccagagcgaggccagttctcayaccctccagtggatgattggytgcgacctggkgtccgacggwcgcctcmtccgcgggtatgaacagtatgcctacgatggcaaggattacctcgccctgaacgaggacctgcgctcctggaccgcagcggacactgcggctcagatctccaagcgcaagtgtgargcggccaatgtggctgaacaaaggagagcctacctggagggcacgtgcgtggagtggctccacagatacctggagaacgggaaggagatgctgcagcgcgcggacccccccaagacacaygtgacccaccaccctgtctttgactatgaggccaccctgaggtgctgggccctgggcttctaccctgcggagatcatactgacctggcagcgggatggggaggaccagacccaggacgtggagctcgtggagaccaggcctgcaggggatggaaccttccagaagtgggcagctgtggtggtgccttctggagaggagcagagatacayrtgccatgtgcagcatgaggggctgccrgagcccctcatgctgagatggaagcagtcttccctgcccaccatccccatcatgggtatcgttgctggyctggttgtccttgcagctgtagtcactggagctgcggtcgctgctgtgctgtggagraagaagagctcagattgaaaaggagggagctactctcaggctgcaatgtgaaacagctgccctgtgtgggactgagtggcaagtccctttgtgacttcaagaaccctgactyctctttstgcagagaccagcccacccctgtgcccaccatgaccctcttcctcatgctgaactgcattccttccccaatcacctttcctgttccagaaaaggggctgggatgtctccgtctctgtctcaaatttgtggtscactgagctataacttacttctgtattaaaattagaatctgagtrtaaatttastttttcaaattatttccaagagagattgatdggttaattaaaggagaagattcctgaaatttgagagacaaaataaatggaagacatgagaactttcc

SEQ ID NO: 105 - DNA, 849 bp, Homo sapiens
atgaacctggcacctctcgagtgccaggccactgcagggtcacgatgctcttggccatcaggaggaagtacctgcagcgccggtgcctcgaggcactgcttcacgggctgcggggttcccagcaggccaggtgcctggcagtggcatggcagcactgggtggatgcccaaggggcagagcagctggtgcggaccctgccagccttccagaagtctgtgccacagccrcgcaccgtggagctttccctgcttgccagccccggggccccttcgttttcaggggaggggggaacggggcagcatcaggcctccacagccaggcaaaaggggaaggccacgagccccaccaagcacaagggttcagactgccttcaacccttaaggggcactttttctctcaaggctcagaatagacaactgtgccaaaaagcagcatggtaggtgtcagcccaatgcccatccagggggctggtgccatggacggctaagtgggcaggcagggcagtggtgtgccccttcagtcacaagtaggtggggcccagctgcccacctctaggaggtggaagggtacagcactttgccacatctcttctacgatgccaccagtgcctgatgcccttgcgtgttttgcctgtactgcacgggctccaagkgtaagttcactgggagtcccaggctggctctggaggctgccttggttcgagggcttagttggcaacaaccactctcctcgccttctcaggaggtgccacccactgtggtcctctgcaggacgcaagtgctccccaccaaaagagcacagactcctggctagagcagagagtactaggttcccatgtggggccgactc

SEQ ID NO: 106 - DNA, 1352 bp, Homo sapiens
ccgagtcaccgcctgccgccgcgcccccggtttctataaattgagcccgcagcctcccgcttcgctctctgctcctcctgttcgacagtcagccgcatcttcttttgcgtcgccagccgagccacatcgctsagacaccatggggaaggtgaaggtcggagtcaacggatttggtcgtattgggcgcctggtcaccagggctgcttttaactctggtaaagtggatattgttgccatcaatgaccccttcattgacctcaactacatggtttacatgttccaatatgattccacccatggcaaattccatggcaccgtcaaggctgagaacgggaagcttgtcatcaatggaaatcccatcaccatcttccaggagcgagatccctccaaaatcaagtggggcgatgctggcgctgagtacgtcgtggagtccactggcgtcttcaccaccatggagaaggctggggctcatttgcaggggggagccaaaagggtcatcatctctgccccctctgctgaygcccccatgttcgtcatgggtgtgaaccatgagaagtatgacaacagcctcaagatcatcagcaatgcctcctgcaccaccaactgcttagcacccctggccaaggtcatccatgacaactttggtatcgtggaaggactcatgaccacagtccatgccatcactgccacccagaagactgtggatggcccctccgggaaactgtggcgtgatggccgcggggctctccagaacatcatccctgcctctactggcgctgccaaggctgtgggcaaggtcatccctgagctgaacgggaagctcactggcatggccttccgtgtccccactgccaacgtgtcagtggtggacctgacctgccgtctagaaaamcctgccaaatatgatgacatcaagaaggtggtgaagcaggcgtcggagggccccytcaagggcrtcytgggctacactgagcaccaggtggtctcctctkacttcaacagcgacacccactcctccaycttygacgctggggctggcattgccctcaacgaccactttgtcaagctcatttcctggtatgacaacgaatttggctacagcaacagggtgrtggacctcatkgcccacatggcctccaaggagtaagacccytggaccaccagccccagcaagagcacaagaggaagagagagaccctcactgctggggagtccctgccacactcagtcccccaccacactgaatctcccctcctcacagttkccatgtagaccccttgaaraggggaggggcctagggagccgcmccttgtcatgtaccatcaataaagtaccctgtgctcaaccagtta

SEQ ID NO: 107 - DNA, 201 bp, Homo sapiens
atggggccacttaccagcttccgaagggctccctcatccagcccagctaaggcctcgtccgccatctcgctggccyctagctccgtcggttcctttctggtgagatccccagtgcctgtggcacctgtcaccagctcagagaattctgcaggggacagacatgaatcaggcatgctggggcttccagaaaccacaggcact

SEQ ID NO: 108 - DNA, 1081 bp, Homo sapiens
atgcgccctgggcctgtgcccgccccaggaagagcgctcccgcgaactgcggcggtggtggctgggccaccagagggaagcgggtgtggcccaggcagcgggggctgggacagacctggaaaggaggaagcggggaaggaaggttgtcctgtcgggctgggggctcccgggaatccggaggccagcagtggaaccgcaaggctctacagggcagatctgcctcccgkgctgtctcagctacgccgagtcgttggctcagggcggaggattttcctattggccgcgttatttgaatggaatggaggataggtcgtgaagtaggtgctgctggttgatctttctaaggaactcagatgaacttgggcatgtcagaattaataaccttttaaaagtggggtctgtgtggccgagggttttaatgtcctacccagggagttgaccagaaccaacatggaaccaccctaacttgcttcagactccattgctagatcaatcctgatttctagatcatagcatctaatctttgccttgcctctggattacaagggtggaaccaagcagaggggttcacccaagccatctttgggtgcttccatgggaaagaaggatttcactgagaataataagtgacaccaaggctcaaaagaatgagagagaagtctgttggtctcttgaacagcagggatttgctcacagatctctggaagtagccagaatgtgacaggatctcaaaatgaatggctgcttcatggaggctggaacataagcctgggactcccagtagccaaacatagctgtgccacaaacatggctgaaatgtagcagtttggtggatccgaggtcagtcattgaaaatgtattgattggcacctattctttgtgaatcattattctgggttctggggtcacargagcaaatgaaacaaatgaagtacctgccatcaatgagcttacattctagtaaagagggacaraaaatgaatacattttaaatgaataaattcagataccgctaaatgtagtgaagaaaaaaattgggctaaagagagcgaaaaacaatttctgaagttactagcagtga

SEQ ID NO: 109 - DNA, 3791 bp, Homo sapiens
attcctccggcctcagatgaccaggcaccactagatacagaayactgtgctttccttctccaagctttttctttcctggctgatgatttgtcattctagtcacttcctgccttgtgaccacacacccrggcttgacaaagctgttctgcagatcagaaagaaggggttcctggtcatacaccagtactaccaaggacagcttttttcctgcaagatctgttacctaaagcaataaaaaatggccagaggatcagtgtccgatgaggaaatgatggagctcagagaagcttttgccaaagttgatactgatggcaatggatacatcagcttcaatgagttgaatgacttgttcaaggctgcttgcttgcctttgcctgggtatagagtacgagaaattacagaaaacctgatggctacaggtgatctggaccaagatggaaggatcagctttgatgagtttatcaagattttccatggcctaaaaagcacagatgttgccaagacctttagaaaagcaatcaataagaaggaagggatttgtgcaatcggtggtacttcagagcagtctagcgttggcacccaacactcctattcagaggaagaaaagtatgcctttgtcaactggataaacaaagccctggaaaatgatcctgattgtcggcatgtcatcccaatgaacccaaacacgaatgatctctttaatgctgttggagatggcattgtcctttgtaaaatgatcaacctgtcagtgccagacacaattgatgaaagaacaatcaacaaaaagaagctaacccctttcaccattcaggaaaatctgaacttggctctgaactctgcctcagccatcgggtgccatgtggtcaacataggggctgaggacctgaaggaggggaagccttatctggtcctgggacttctgtggcaagtcatcaagattgggttgtttgctgacattgaactcagcagaaatgaagctctgattgctcttttgagagaaggtgagagcctggaggatttgatgaaactctcccctgaagagctcttgctgaggtgggctaattaccacctggaaaatgcaggctgcaacaaaattggcaacttcagtactgacatcaaggactcaaaagcttattaccacctgcttgagcaggtggctccaaaaggagatgaagaaggtgttcctgctgttgttattgacatgtcaggactgcgggagaaggatgacatccagagggcagaatgcatgctgcagcaggcggagaggctgggctgccggcagtttgtcacagccacagatgttgtccgagggaaccccaagttgaacttggcttttattgccaacctctttaacagataccctgccctgcacaaaccagagaaccaggacattgactggggggctcttgaaggtgagacgagagaagagcggacatttaggaactggatgaactccctgggtgttaaccctcgagtcaatcatttgtacagtgacttatcagatgccctggtcatcttccagctctatgaaaagatcaaagttcctgttgactggaacagagtaaacaaaccgccataccccaaactgggaggcaatatgaagaagcttgagaattgtaactacgcggtagaattggggaagaatcaagcgaagttctccctggttggcatcggtggacaagatctcaatgaaggaaaccgcactctcacactggccttgatttggcagctaatgagaaggtatacactgaatatcctcgaagaaattggtggtggccagaaggtcaatgatgacattattgtcaactgggtgaatgaaacattgagggaagcaragaaaagttcatccatctctagtttcaaggaccckaagattagtacaagtctgcctgttctggacctcatcgatgccatccaaccaggttccattaactatgaccttctgaagacagaaaatctgaatgatgatgagaaactcaacaatgcaaaatatgccatctctatggcccgaaaaattggagcaagagtgtatgccctgccagaagacctggttgaagtgaaccccaaaatggtcatgaccgtgtttgcctgcctcatggggaaaggaatgaagagggtgtgaggcccaatggggctgggtgggaggcggtgcactcactcctgactgcccggcacagatgctccagggatgattcaagccattccaaagttcaacttggtgacactctataagattccaaaaagcacatattagtgcagccaagtagcctctcctgtatttaacaaaaagtgcttcattctttgcaggaggcccaacctcctatatataggtttctattcttgatttatttgcttcttcgaaaatctagaggaaaagaaagaagttattttccaggtacccttctcgcttttgccattagccaaggatagaagctgcagtggtattaattttgatataatctttcaaaccagcttswtgtggcttcccttttctttgttcaagatgagggccaggaggggaaacatcacacctgccctaaaccctgttcctggaggtcagcatttgatctgttgcaagcccctctttctgtcccctcttcctaccctgcctcccwtgactttgctcctcacacttttggaaycatgccttccgggggggcccatctcttctggccgtccttgtctctgggccacttggagtgtgtgataaatcagtcaagctgttgaagtctcaggagtctctggtagcctgcagaagtaagcctcatcatcagagcctttcctcaaaactggagtcccaaatgtcatcaggttttgttttttttcagccactaagaacccctctgcttttaactctagaatttgggcttggaccagatctaacatcttgaatactctgccctctagagccttcagccttaatggaaggttggatccaaggagggtgtaatggagcatcaagccactcggcggcagcatggagctataactaagcatcctttagggttctgcctctccaggcatttagccctcacattagatctagttactgtggtatggctaatacctgtcaacatttggaggcaatcctaccttgcttttgcttctagagcttagcatatctgattgttgtcaggccatattatcaatgtttacttttttggtactataaaagctttctgccacccctaaactccaggggggamaatatgtgccaatcaatagcacccctactcacatacacacacacctagccagctgtcaagggcagaatgaatctatgctggataagaaatggtggaactgcgttatgaagagctaatttactggacaaagaattccaaagcaaaaccagaacagtatgaatttgagcaggtctcataggttgagcaatttccccctaaaccaactgaaggctaaaaagcaacaggccattgtgaaccaatgcaagacgccctctatcatggtgaaaagctccatcaatgaggtatcttctttagtggtggtatgtaatggaacttagccatttttcaaagcaattgaaatgcattgctctggatctgttccttggcagtggactcagaaagccaacatgtggctcctcccagcccataaccagtatttttgctgcttctgaatacaaattggttggttttgacttcagattgaacttactgtagcctcagatgatttcccccctccgcctccaggaagaaagaatgttactgccttaataaaaaatgaaaagagaatgatgctcaaaatctttccaaataaaatgttccytatat

SEQ ID NO: 110 - DNA, 3727 bp, Homo sapiens
ctttttctttcctggctgatgatttgtcattctagtcacttcctgccttgtgaccacacacccrggcttgacaaagctgttctgcagatcagaaagaaggggttcctggtcatacaccagtactaccaaggacagcttttttcctgcaagatctgttacctaaagcaataaaaaatggccagaggatcagtgtccgatgaggaaatgatggagctcagagaagcttttgccaaagttgatactgatggcaatggatacatcagcttcaatgagttgaatgacttgttcaaggctgcttgcttgcctttgcctgggtatagagtacgagaaattacagaaaacctgatggctacaggtgatctggaccaagatggaaggatcagctttgatgagtttatcaagattttccatggcctaaaaagcacagatgttgccaagacctttagaaaagcaatcaataagaaggaagggatttgtgcaatcggtggtacttcagagcagtctagcgttggcacccaacactcctattcagaggaagaaaagtatgcctttgtcaactggataaacaaagccctggaaaatgatcctgattgtcggcatgtcatcccaatgaacccaaacacgaatgatctctttaatgctgttggagatggcattgtcctttgtaaaatgatcaacctgtcagtgccagacacaattgatgaaagaacaatcaacaaaaagaagctaacccctttcaccattcaggaaaatctgaacttggctctgaactctgcctcagccatcgggtgccatgtggtcaacataggggctgaggacctgaaggaggggaagccttatctggtcctgggacttctgtggcaagtcatcaagattgggttgtttgctgacattgaactcagcagaaatgaagctctgattgctcttttgagagaaggtgagagcctggaggatttgatgaaactctcccctgaagagctcttgctgaggtgggctaattaccacctggaaaatgcaggctgcaacaaaattggcaacttcagtactgacatcaaggactcaaaagcttattaccacctgcttgagcaggtggctccaaaaggagatgaagaaggtgttcctgctgttgttattgacatgtcaggactgcgggagaaggatgacatccagagggcagaatgcatgctgcagcaggcggagaggctgggctgccggcagtttgtcacagccacagatgttgtccgagggaaccccaagttgaacttggcttttattgccaacctctttaacagataccctgccctgcacaaaccagagaaccaggacattgactggggggctcttgaaggtgagacgagagaagagcggacatttaggaactggatgaactccctgggtgttaaccctcgagtcaatcatttgtacagtgacttatcagatgccctggtcatcttccagctctatgaaaagatcaaagttcctgttgactggaacagagtaaacaaaccgccataccccaaactgggaggcaatatgaagaagcttgagaattgtaactacgcggtagaattggggaagaatcaagcgaagttctccctggttggcatcggtggacaagatctcaatgaaggaaaccgcactctcacactggccttgatttggcagctaatgagaaggtatacactgaatatcctcgaagaaattggtggtggccagaaggtcaatgatgacattattgtcaactgggtgaatgaaacattgagggaagcaragaaaagttcatccatctctagtttcaaggaccckaagattagtacaagtctgcctgttctggacctcatcgatgccatccaaccaggttccattaactatgaccttctgaagacagaaaatctgaatgatgatgagaaactcaacaatgcaaaatatgccatctctatggcccgaaaaattggagcaagagtgtatgccctgccagaagacctggttgaagtgaaccccaaaatggtcatgaccgtgtttgcctgcctcatggggaaaggaatgaagagggtgtgaggcccaatggggctgggtgggaggcggtgcactcactcctgactgcccggcacagatgctccagggatgattcaagccattccaaagttcaacttggtgacactctataagattccaaaaagcacatattagtgcagccaagtagcctctcctgtatttaacaaaaagtgcttcattctttgcaggaggcccaacctcctatatataggtttctattcttgatttatttgcttcttcgaaaatctagaggaaaagaaagaagttattttccaggtacccttctcgcttttgccattagccaaggatagaagctgcagtggtattaattttgatataatctttcaaaccagcttswtgtggcttcccttttctttgttcaagatgagggccaggaggggaaacatcacacctgccctaaaccctgttcctggaggtcagcatttgatctgttgcaagcccctctttctgtcccctcttcctaccctgcctcccwtgactttgctcctcacacttttggaaycatgccttccgggggggcccatctcttctggccgtccttgtctctgggccacttggagtgtgtgataaatcagtcaagctgttgaagtctcaggagtctctggtagcctgcagaagtaagcctcatcatcagagcctttcctcaaaactggagtcccaaatgtcatcaggttttgttttttttcagccactaagaacccctctgcttttaactctagaatttgggcttggaccagatctaacatcttgaatactctgccctctagagccttcagccttaatggaaggttggatccaaggagggtgtaatggagcatcaagccactcggcggcagcatggagctataactaagcatcctttagggttctgcctctccaggcatttagccctcacattagatctagttactgtggtatggctaatacctgtcaacatttggaggcaatcctaccttgcttttgcttctagagcttagcatatctgattgttgtcaggccatattatcaatgtttacttttttggtactataaaagctttctgccacccctaaactccaggggggamaatatgtgccaatcaatagcacccctactcacatacacacacacctagccagctgtcaagggcagaatgaatctatgctggataagaaatggtggaactgcgttatgaagagctaatttactggacaaagaattccaaagcaaaaccagaacagtatgaatttgagcaggtctcataggttgagcaatttccccctaaaccaactgaaggctaaaaagcaacaggccattgtgaaccaatgcaagacgccctctatcatggtgaaaagctccatcaatgaggtatcttctttagtggtggtatgtaatggaacttagccatttttcaaagcaattgaaatgcattgctctggatctgttccttggcagtggactcagaaagccaacatgtggctcctcccagcccataaccagtatttttgctgcttctgaatacaaattggttggttttgacttcagattgaacttactgtagcctcagatgatttcccccctccgcctccaggaagaaagaatgttactgccttaataaaaaatgaaaagagaatgatgctcaaaatctttccaaataaaatgttccytatat

SEQ ID NO: 111 - DNA, 4038 bp, Homo sapiens
aggcgaggcgggcgccgggaggggcaggcccagcccacggtgcagcgcgcgcggagccctcgccttcctccgacgcactgtggggctgcaggggaagctgcgggccgtgggggccggaggagaagccggctccacgcgcagctgctggcgaatgaggaaagatccagctctgacagaataatgagttgtgcaaagtgaaggccaaatgacatcaccggagatagcagtagttcaaagaaagcaaagcagaggaattgaactgctgcaaaatgcacgagtctcaaacattgtctcagcagcagcatcatatcttacaaaagttgaggaaatactgtatttccagcttaggaaactgaagattcctccggcctcagatgaccaggcaccactagatacagaayactgtgctttccttctccaagtcacttcctgccttgtgaccacacacccrggcttgacaaagctgttctgcagatcagaaagaaggggttcctggtcatacaccagtactaccaaggacagcttttttcctgcaagatctgttacctaaagcaataaaaaatggccagaggatcagtgtccgatgaggaaatgatggagctcagagaagcttttgccaaagttgatactgatggcaatggatacatcagcttcaatgagttgaatgacttgttcaaggctgcttgcttgcctttgcctgggtatagagtacgagaaattacagaaaacctgatggctacaggtgatctggaccaagatggaaggatcagctttgatgagtttatcaagattttccatggcctaaaaagcacagatgttgccaagacctttagaaaagcaatcaataagaaggaagggatttgtgcaatcggtggtacttcagagcagtctagcgttggcacccaacactcctattcagaggaagaaaagtatgcctttgtcaactggataaacaaagccctggaaaatgatcctgattgtcggcatgtcatcccaatgaacccaaacacgaatgatctctttaatgctgttggagatggcattgtcctttgtaaaatgatcaacctgtcagtgccagacacaattgatgaaagaacaatcaacaaaaagaagctaacccctttcaccattcaggaaaatctgaacttggctctgaactctgcctcagccatcgggtgccatgtggtcaacataggggctgaggacctgaaggaggggaagccttatctggtcctgggacttctgtggcaagtcatcaagattgggttgtttgctgacattgaactcagcagaaatgaagctctgattgctcttttgagagaaggtgagagcctggaggatttgatgaaactctcccctgaagagctcttgctgaggtgggctaattaccacctggaaaatgcaggctgcaacaaaattggcaacttcagtactgacatcaaggactcaaaagcttattaccacctgcttgagcaggtggctccaaaaggagatgaagaaggtgttcctgctgttgttattgacatgtcaggactgcgggagaaggatgacatccagagggcagaatgcatgctgcagcaggcggagaggctgggctgccggcagtttgtcacagccacagatgttgtccgagggaaccccaagttgaacttggcttttattgccaacctctttaacagataccctgccctgcacaaaccagagaaccaggacattgactggggggctcttgaaggtgagacgagagaagagcggacatttaggaactggatgaactccctgggtgttaaccctcgagtcaatcatttgtacagtgacttatcagatgccctggtcatcttccagctctatgaaaagatcaaagttcctgttgactggaacagagtaaacaaaccgccataccccaaactgggaggcaatatgaagaagcttgagaattgtaactacgcggtagaattggggaagaatcaagcgaagttctccctggttggcatcggtggacaagatctcaatgaaggaaaccgcactctcacactggccttgatttggcagctaatgagaaggtatacactgaatatcctcgaagaaattggtggtggccagaaggtcaatgatgacattattgtcaactgggtgaatgaaacattgagggaagcaragaaaagttcatccatctctagtttcaaggaccckaagattagtacaagtctgcctgttctggacctcatcgatgccatccaaccaggttccattaactatgaccttctgaagacagaaaatctgaatgatgatgagaaactcaacaatgcaaaatatgccatctctatggcccgaaaaattggagcaagagtgtatgccctgccagaagacctggttgaagtgaaccccaaaatggtcatgaccgtgtttgcctgcctcatggggaaaggaatgaagagggtgtgaggcccaatggggctgggtgggaggcggtgcactcactcctgactgcccggcacagatgctccagggatgattcaagccattccaaagttcaacttggtgacactctataagattccaaaaagcacatattagtgcagccaagtagcctctcctgtatttaacaaaaagtgcttcattctttgcaggaggcccaacctcctatatataggtttctattcttgatttatttgcttcttcgaaaatctagaggaaaagaaagaagttattttccaggtacccttctcgcttttgccattagccaaggatagaagctgcagtggtattaattttgatataatctttcaaaccagcttswtgtggcttcccttttctttgttcaagatgagggccaggaggggaaacatcacacctgccctaaaccctgttcctggaggtcagcatttgatctgttgcaagcccctctttctgtcccctcttcctaccctgcctcccwtgactttgctcctcacacttttggaaycatgccttccgggggggcccatctcttctggccgtccttgtctctgggccacttggagtgtgtgataaatcagtcaagctgttgaagtctcaggagtctctggtagcctgcagaagtaagcctcatcatcagagcctttcctcaaaactggagtcccaaatgtcatcaggttttgttttttttcagccactaagaacccctctgcttttaactctagaatttgggcttggaccagatctaacatcttgaatactctgccctctagagccttcagccttaatggaaggttggatccaaggagggtgtaatggagcatcaagccactcggcggcagcatggagctataactaagcatcctttagggttctgcctctccaggcatttagccctcacattagatctagttactgtggtatggctaatacctgtcaacatttggaggcaatcctaccttgcttttgcttctagagcttagcatatctgattgttgtcaggccatattatcaatgtttacttttttggtactataaaagctttctgccacccctaaactccaggggggamaatatgtgccaatcaatagcacccctactcacatacacacacacctagccagctgtcaagggcagaatgaatctatgctggataagaaatggtggaactgcgttatgaagagctaatttactggacaaagaattccaaagcaaaaccagaacagtatgaatttgagcaggtctcataggttgagcaatttccccctaaaccaactgaaggctaaaaagcaacaggccattgtgaaccatggtgaaaagctccatcaatgaggtatcttctttagtggtggtatgtaatggaacttagccatttttcaaagcaattgaaatgcattgctctggatctgttccttggcagtggactcagaaagccaacatgtggctcctcccagcccataaccagtatttttgctgcttctgaatacaaattggttggttttgacttcagattgaacttactgtagcctcagatgatttcccccctccgcctccaggaagaaagaatgttactgccttaat

SEQ ID NO: 112 - DNA, 1524 bp, Homo sapiens
agtcgccgctgggcaccccgagaccatggggaagctcgtggcgctggtcctgctgggggtcggcctgtccttagtcggggagatgttyctggcgtttagagaaagggtgaatgcctctcgagaagtggagccagtagaacctgaaaactgccaccttattgaggaacttgaaagtggctctgaagatattgatatacttcctagtgggctggcttttatctccagtctgcaggtctgttggagtttgctggaagtccactccagaccctgtttgcctgggtatcaccagtggaggctgcagaacggcaaatattgctgcctgatttttcttctggaagcttcatcccagaggggcatccgcctgtatgagggattaaaatatccaggcatgccaaactttgcgccagatgaaccaggaaaaatcttcttgatggatctgaatgaacaaaacccaagggcacaagcrctagaaatcagtggtggatttgacaaagaattatttaatccacatgggatcagtattttcatcgacaaagacaatactgtrtatctttatgttgtgaatcatccccacatgaagtccactgtggagatatttaaatttgaggaacaacaacgttctctggtatacctgaaaactataaaacatgaacttctcaaaagtgtgaatgacattgtggttcttggaccagaacagttctatgmcaccagagaccactattttaccaactccctcctgtcattttttgagatgatcttggatcttcgctggacttatgttcttttctacagcccaagggaggttaaagtggtggccaaaggattttgtagtgccaatgggatcacagtctcagcagaccagaagtatgtctatgtagctgatgtagcagctaagaacattcacataatggaaaaacatgataactgggatttaactcaactgaaggtgatacagttgggcaccttagtggataacctgactgtcgatcctgccacaggagacattttggcaggatgccatcctaatcctatgaagctactgaactataaccctgaggaccctccaggatcagaagtacttcgcatccagaatgttttgtctgagaagcccagggtgagcaccgtgtatgccaacaatggctctgtgcttcagggcacctctgtggcttctgtgtaccatgggaaaattctcataggcaccgtatttcacaaaactctgtactgtgagctctagactctagatagtaaaaaaaaaaaaaaaaagtctacatattttgtaaaagtaaactgataattgtatgataagtggcactgtaagtaaatagcaaacaccaaccagtgagtgtggcttttcttatggatagaagtaaaggagcagacagagattccttgatagccatcaaattgcaagtcaggttaatgacagtccaacaagaagccaaactttacggatctttgttagcagccccaatgttctttctacaataaaacatgtggactatgtccagtgaggtctccgactca

SEQ ID NO: 113 - DNA, 2568 bp, Homo sapiens
ttggaaggagcaaaatgggacttttggctgaaagtgctgagctcctgcggtgggggctgaccgcaagccrcgccttctgtgcacctggtcggcccagctagctgcsgacccggcggggaggggyggggcgggccaatcggcgctgccccagcagggctgcggctgcaggcaggcagagcctcctagcccgtcggtgtctgcgcccatcgatccctttgtctatccccgaccatggcgaagctgattgcgctcaccctcttggggatgggactggcactcttcaggaaccaccagtcttcttaccaaacacgacttaatgctctccgagaggtacaacccgtagaacttcctaactgtaatttagttaaaggaatcgaaactggctctgaagacwtggagatactgcctaatggactggctttcattagctctggattaaagtatcctggaataaagagcttcaaccccaacagtcctggaaaaatacttctgatggacctgaatgaagaagatccaacagtgttggaattggggatcactggaagtaaatttgatrtatcttcatttaaccctcatgggattagcacattcacagatgaagataatgccatgtacctcctggtggtgaaccatccagatgccaagtccacagtggagttgtttaaatttcaagaagaagaaaaatcgcttttgcatctaaaaaccatcagacataaacttctgcctaatttgaatgatattgttgctgtgggacctgagcacttttatggcacaaatgatcactattttcttgacccctacttacratcctgggagatgtatttgggtttagcgtggtcgtatgttgtctactatagtccaagtgaagttcgagtggtggcagaaggatttgattttgctaatggaatcaacatttcacccgatggcaagtatgtctatatagctgagttgctggctcataagattcatgtgtatgaaaagcatgctaattggactttaactccattgaagtcccttgactttaataccctcgtggataacatatctgtggatcctgagacaggagacctttgggttggatgccatcccaatggcatgaaaatcttcttctatgactcagagaatcctcctgcatcagaggtgcttcgaatccagaacattctaacagaagaacctaaagtgacacaggtttatgcagaaaatggcacagtgttgcaaggcagtacagttgcctctgtgtacaaagggaaactgctgattggcacagtgtttcacaaagctctttactgtgagctctaacagaccgatttgcacccatgccatagaaactgaggccattatttcaaccgcttgccatattccgaggacccagtgttcttagctgaacaatgaatgctgaccctaaatgtggacatcatgaagcatcaaagcactgtttaactgggagtgatatgatgtgtagggcttttttttgagaatacactatcaaatcagtcttggaatacttgaaaacctcatttaccataaaaatccttctcactaaaatggataaatcagttatgtcaattgtcagatattaaataacagtgtgtgaccccaaaagtacttaccctaaaacatgtgttgcctgaaagcacatgtgtgtatcgctgccttgccatgtcttgttcagaagacacaggggagcagggttagctcacgtgtctttagaactccagtactcacccagggactccagttcacaggccagaaaacatatgcattatgaagttcccctctactccatgcacatagtaagtctgactatggcagtcagacttacttactcccattttcccttcgatatatgactttttctcagtaaatattaacctgaactattccaactccccttgtactcttgctttttcaattctcctgttgcaatgacacataggaaaatcttaaaattcttgggagtgttgtcacacctgaaaattatgagtctctatgatcttggcacaaattgtacatttgagtgtctttgacttggttaaaggaagtttgttcacttcgatgactggatacagaatgaatcccataattgacatgggcgaagctaaaagtgtccccaaagactacactgttgttgaggtggtggtagtgctggtgggtttttgtttaatatttaaacttcttgttgtggaggctgaaaagaaaaaaaataatagaaaggtaaacaaacaaataaatagaaaagatcaacaacccctttggctatctactgagacatgactaggaagaaaacatgactttatcattttgttatagaarctgatatataaaggttacacattttcatttatttgtttttctgatttgaaggtataaccttcatgatgaattacttcttcagggtgttaaggcagtgactttagaaacaaatttttttcttgtttttgttttgtttttgagaccgaatctcactctgttgcccaggctggagtgcagtggtgcgatcttggctcactgcaacttctacctccgaggttcaagagattcttgtgcctcagcctcccggatagctgg

SEQ ID NO: 114 - DNA, 2609 bp, Homo sapiens
gaataatcaagaagttacaccagggacagcatttcgctgcaggtctgttggagtttgctggaagtccactccagaccctgtttgcctgggtatcaccagtggaggctgcagaacggcaaatattgctgcctgatttttcttctggaagcttcatcccagaggggcatccgcctgtatgagggattaaaatatccaggcatgccaaactttgcgccagatgaaccaggaaaaatcttcttgatggatctgaatgaacaaaacccaagggcacaagcrctagaaatcagtggtggatttgacaaagaattatttaatccacatgggatcagtattttcatcgacaaagaacacgacttaatgctctccgagaggtacaacccgtagaacttcctaactgtaatttagttaaaggaatcgaaactggctctgaagacwtggagatactgcctaatggactggctttcattagctctggattaaagtatcctggaataaagagcttcaaccccaacagtcctggaaaaatacttctgatggacctgaatgaagaagatccaacagtgttggaattggggatcactggaagtaaatttgatrtatcttcatttaaccctcatgggattagcacattcacagatgaagataatgccatgtacctcctggtggtgaaccatccagatgccaagtccacagtggagttgtttaaatttcaagaagaagaaaaatcgcttttgcatctaaaaaccatcagacataaacttctgcctaatttgaatgatattgttgctgtgggacctgagcacttttatggcacaaatgatcactattttcttgacccctacttacratcctgggagatgtatttgggtttagcgtggtcgtatgttgtctactatagtccaagtgaagttcgagtggtggcagaaggatttgattttgctaatggaatcaacatttcacccgatggcaagtatgtctatatagctgagttgctggctcataagattcatgtgtatgaaaagcatgctaattggactttaactccattgaagtcccttgactttaataccctcgtggataacatatctgtggatcctgagacaggagacctttgggttggatgccatcccaatggcatgaaaatcttcttctatgactcagagaatcctcctgcatcagaggtgcttcgaatccagaacattctaacagaagaacctaaagtgacacaggtttatgcagaaaatggcacagtgttgcaaggcagtacagttgcctctgtgtacaaagggaaactgctgattggcacagtgtttcacaaagctctttactgtgagctctaacagaccgatttgcacccatgccatagaaactgaggccattatttcaaccgcttgccatattccgaggacccagtgttcttagctgaacaatgaatgctgaccctaaatgtggacatcatgaagcatcaaagcactgtttaactgggagtgatatgatgtgtagggcttttttttgagaatacactatcaaatcagtcttggaatacttgaaaacctcatttaccataaaaatccttctcactaaaatggataaatcagttatgtcaattgtcagatattaaataacagtgtgtgaccccaaaagtacttaccctaaaacatgtgttgcctgaaagcacatgtgtgtatcgctgccttgccatgtcttgttcagaagacacaggggagcagggttagctcacgtgtctttagaactccagtactcacccagggactccagttcacaggccagaaaacatatgcattatgaagttcccctctactccatgcacatagtaagtctgactatggcagtcagacttacttactcccattttcccttcgatatatgactttttctcagtaaatattaacctgaactattccaactccccttgtactcttgctttttcaattctcctgttgcaatgacacataggaaaatcttaaaattcttgggagtgttgtcacacctgaaaattatgagtctctatgatcttggcacaaattgtacatttgagtgtctttgacttggttaaaggaagtttgttcacttcgatgactggatacagaatgaatcccataattgacatgggcgaagctaaaagtgtccccaaagactacactgttgttgaggtggtggtagtgctggtgggtttttgtttaatatttaaacttcttgttgtggaggctgaaaagaaaaaaaataatagaaaggtaaacaaacaaataaatagaaaagatcaacaacccctttggctatctactgagacatgactaggaagaaaacatgactttatcattttgttatagaarctgatatataaaggttacacattttcatttatttgtttttctgatttgaaggtataaccttcatgatgaattacttcttcagggtgttaaggcagtgactttagaaacaaatttttttcttgtttttgttttgtttttgagaccgaatctcactctgttgcccaggctggagtgcagtggtgcgatcttggctcactgcaacttctacctccgaggttcaagagattcttgtgcctcagcctcccggatagctgg

SEQ ID NO: 115 - DNA, 1380 bp, Homo sapiens
agtcgccgctgggcaccccgagaccatggggaagctcgtggcgctggtcctgctgggggtcggcctgtccttagtcggggagatgttyctggcgtttagagaaagggtgaatgcctctcgagaagtggagccagtagaacctgaaaactgccaccttattgaggaacttgaaagtggctctgaagatattgatatacttcctagtgggctggcttttatctccagtggattaaaatatccaggcatgccaaactttgcgccagatgaaccaggaaaaatcttcttgatggatctgaatgaacaaaacccaagggcacaagcrctagaaatcagtggtggatttgacaaagaattatttaatccacatgggatcagtattttcatcgacaaagacaatactgtrtatctttatgttgtgaatcatccccacatgaagtccactgtggagatatttaaatttgaggaacaacaacgttctctggtatacctgaaaactataaaacatgaacttctcaaaagtgtgaatgacattgtggttcttggaccagaacagttctatgmcaccagagaccactattttaccaactccctcctgtcattttttgagatgatcttggatcttcgctggacttatgttcttttctacagcccaagggaggttaaagtggtggccaaaggattttgtagtgccaatgggatcacagtctcagcagaccagaagtatgtctatgtagctgatgtagcagctaagaacattcacataatggaaaaacatgataactgggatttaactcaactgaaggtgatacagttgggcaccttagtggataacctgactgtcgatcctgccacaggagacattttggcaggatgccatcctaatcctatgaagctactgaactataaccctgaggaccctccaggatcagaagtacttcgcatccagaatgttttgtctgagaagcccagggtgagcaccgtgtatgccaacaatggctctgtgcttcagggcacctctgtggcttctgtgtaccatgggaaaattctcataggcaccgtatttcacaaaactctgtactgtgagctctagactctagatagtaaaaaaaaaaaaaaaaagtctacatattttgtaaaagtaaactgataattgtatgataagtggcactgtaagtaaatagcaaacaccaaccagtgagtgtggcttttcttatggatagaagtaaaggagcagacagagattccttgatagccatcaaattgcaagtcaggttaatgacagtccaacaagaagccaaactttacggatctttgttagcagccccaatgttctttctacaataaaacatgtggactatgtccagtgaggtctccgactca

SEQ ID NO: 116 - DNA, 2748 bp, Homo sapiens
gaataatcaagaagttacaccagggacagcatttcgctgcaggtctgttggagtttgctggaagtccactccagaccctgtttgcctgggtatcaccagtggaggctgcagaacggcaaatattgctgcctgatttttcttctggaagcttcatcccagaggggcatccgcctgtatgagttggaaggagcaaaatgggacttttggctgaaagtgctgagctcctgcggtgggggctgaccgcaagccrcgccttctgtgcacctggtcggcccagctagctgcsgacccggcggggaggggyggggcgggccaatcggcgctgccccagcagggctgcggctgcaggcaggcagagcctcctagcccgtcggtgtctgcgcccatcgatccctttgtctatccccgaccatggcgaagctgattgcgctcaccctcttggggatgggactggcactcttcaggaaccaccagtcttcttaccaaacacgacttaatgctctccgagaggtacaacccgtagaacttcctaactgtaatttagttaaaggaatcgaaactggctctgaagacwtggagatactgcctaatggactggctttcattagctctggattaaagtatcctggaataaagagcttcaaccccaacagtcctggaaaaatacttctgatggacctgaatgaagaagatccaacagtgttggaattggggatcactggaagtaaatttgatrtatcttcatttaaccctcatgggattagcacattcacagatgaagataatgccatgtacctcctggtggtgaaccatccagatgccaagtccacagtggagttgtttaaatttcaagaagaagaaaaatcgcttttgcatctaaaaaccatcagacataaacttctgcctaatttgaatgatattgttgctgtgggacctgagcacttttatggcacaaatgatcactattttcttgacccctacttacratcctgggagatgtatttgggtttagcgtggtcgtatgttgtctactatagtccaagtgaagttcgagtggtggcagaaggatttgattttgctaatggaatcaacatttcacccgatggcaagtatgtctatatagctgagttgctggctcataagattcatgtgtatgaaaagcatgctaattggactttaactccattgaagtcccttgactttaataccctcgtggataacatatctgtggatcctgagacaggagacctttgggttggatgccatcccaatggcatgaaaatcttcttctatgactcagagaatcctcctgcatcagaggtgcttcgaatccagaacattctaacagaagaacctaaagtgacacaggtttatgcagaaaatggcacagtgttgcaaggcagtacagttgcctctgtgtacaaagggaaactgctgattggcacagtgtttcacaaagctctttactgtgagctctaacagaccgatttgcacccatgccatagaaactgaggccattatttcaaccgcttgccatattccgaggacccagtgttcttagctgaacaatgaatgctgaccctaaatgtggacatcatgaagcatcaaagcactgtttaactgggagtgatatgatgtgtagggcttttttttgagaatacactatcaaatcagtcttggaatacttgaaaacctcatttaccataaaaatccttctcactaaaatggataaatcagttatgtcaattgtcagatattaaataacagtgtgtgaccccaaaagtacttaccctaaaacatgtgttgcctgaaagcacatgtgtgtatcgctgccttgccatgtcttgttcagaagacacaggggagcagggttagctcacgtgtctttagaactccagtactcacccagggactccagttcacaggccagaaaacatatgcattatgaagttcccctctactccatgcacatagtaagtctgactatggcagtcagacttacttactcccattttcccttcgatatatgactttttctcagtaaatattaacctgaactattccaactccccttgtactcttgctttttcaattctcctgttgcaatgacacataggaaaatcttaaaattcttgggagtgttgtcacacctgaaaattatgagtctctatgatcttggcacaaattgtacatttgagtgtctttgacttggttaaaggaagtttgttcacttcgatgactggatacagaatgaatcccataattgacatgggcgaagctaaaagtgtccccaaagactacactgttgttgaggtggtggtagtgctggtgggtttttgtttaatatttaaacttcttgttgtggaggctgaaaagaaaaaaaataatagaaaggtaaacaaacaaataaatagaaaagatcaacaacccctttggctatctactgagacatgactaggaagaaaacatgactttatcattttgttatagaarctgatatataaaggttacacattttcatttatttgtttttctgatttgaaggtataaccttcatgatgaattacttcttcagggtgttaaggcagtgactttagaaacaaatttttttcttgtttttgttttgtttttgagaccgaatctcactctgttgcccaggctggagtgcagtggtgcgatcttggctcactgcaacttctacctccgaggttcaagagattcttgtgcctcagcctcccggatagctgg

SEQ ID NO: 117 - DNA, 2260 bp, Homo sapiens
  misc_feature (1)...(2260): n = A,T,C or G, or insertion/deletion polymorphism (see Tables 1-2)
acagagctcaggacagggctgaggaaccatgtctccatccccgaccgccctcttctgtcttgggctgtgtctggggcgtgtgccagcgcagagtggaccgctccccaagccctccctccaggctctgcccagctccctggtgcccctggagaagccagtgaccctccggtgccagggacctccgggcgtggacctgtaccgcctggagaagctgagttccagcaggtaccaggatcaggcagtcctcttcatcccggccatgaagagaagtctggctggacgctaccgctgctcctaccagaacggaagcctctggtccctgcccagcgaccagctggagctcgttgccacgggagtttttgccaaaccctcgctctcagcccagcccggcccggcggtgtcgtcaggaggggacgtaaccctacagtgtcagactcggtatggctttgaccaatttgctctgtacaaggaaggggaccctgcgccctacaagaatcccgagagatggtacmgggctagtttncccatcatcacrgtgaccgccgcccacagcggaacctaccgatgctacagcttctccagcagggacccatacctgtggtcrgcccccagcgaccccctggagcttgtggtcacaggaacctctgtgacccccagccggttaccaacagaaccaccttccycggtagcagaattctcagaagccaccgctgaactgaccgtctcattcacaaacraagtcttcacaactgagacttctaggagtatcaccrccagtccaaaggagtcagactctccagctggtcctgcccgccagtactacaccaagggcaacctggtccggatatgcctcggrgctgtgatcctaataatcctggcggggtttctggcagaggactggcacagccggaggaagcgcctgcggcacaggggcagggctgtgcagaggccgcttccgcccctsccgcccctcccgcwgacccggaaatcahacgggggtcaggatggaggccgacaggatgttcacagccgcgggttatgttcatgaccgctgaaccccaggcacggtcgtatccaagggagggatcatggcatgggaggcgactcaaagactggcgtgtgtggagcgtggaagcaggagggcagaggctacagctgtggaaacgaggccatgctgcctcctcctggtgttccatcagggagccgttcggccagtgtctgtctgtctgtctgcctctctgtctgagggcaccctccatttgggatggaaggaatctgtggagaccccatcctcctccctgcacactgtggatgacatggtaccctggctggaccacatactggcctctttcttcaacctctctaatatgggctccagacggatctctaaggttcccagctctcagggttgactctgttccatcctctgtgcaaaatcctccygtgcttccctttggccctctgtgctcttgtctggttttccccagaaactctcaccctcactccatctcccactgcggtctaacaaatctcctttcgtctctcagaacgggtcttgcaggcagtttgggtatgtcattcattttccttagtgtaaaactagcacgttgcccgcttcccttcacattagaaaacaagatcagcctgtgcaacatggtgaaacctcatctctaccaacaaaacaaaaaaacacaaaaattagccaggtgtggtggtgcatccctatactcccagcaactcrgggggctgaggtgggagaatggcttgagcctgggaggcagaggttgcagtgagctgagatcacaccactgcactctagctcgggtgaygaagcctgacyttgtctcaaaaaatacagggatgaatatgtcaattaccctgatttgatcatagcacgttgtatacatgtactgcaatattgctgtccaccccataaatatgtacaattmtgtatacatttttaaaatcataaaaataagataatgcaccgtctccacccctctcatatttactttctgaaggaaatgttaggtcttctcaaggtaaagttctatatttattatagcgtttaggcatttcttgaccatctaatgagtgtaaaactgtaccactgggccaagtgcagtggatcatgtctgtaatcctagcactgtgggaggccaaggcaggaggatcgcttgagcccaggagttcaagaccagcctgggcaacatagtgagaccccatctctacttaaaataaagaagataaaaattgtttt

SEQ ID NO: 118 - DNA, 2206 bp, Homo sapiens
  misc_feature (1)...(2206): n = A,T,C or G, or insertion/deletion polymorphism (see Tables 1-2)
acagagctcaggacagggctgaggaaccatgtctccatccccgaccgccctcttctgtcttgggctgtgtctggggcgtgtgccagcgcagagtggaccgctccccaagccctccctccaggctctgcccagctccctggtgcccctggagaagccagtgaccctccggtgccagggacctccgggcgtggacctgtaccgcctggagaagctgagttccagcaggtaccaggatcaggcagtcctcttcatcccggccatgaagagaagtctggctggacgctaccgctgctcctaccagaacggaagcctctggtccctgcccagcgaccagctggagctcgttgccacgggagtttttgccaaaccctcgctctcagcccagcccggcccggcggtgtcgtcaggaggggacgtaaccctacagtgtcagactcggtatggctttgaccaatttgctctgtacaaggaaggggaccctgcgccctacaagaatcccgagagatggtacmgggctagtttncccatcatcacrgtgaccgccgcccacagcggaacctaccgatgctacagcttctccagcagggacccatacctgtggtcrgcccccagcgaccccctggagcttgtggtcacagaattctcagaagccaccgctgaactgaccgtctcattcacaaacraagtcttcacaactgagacttctaggagtatcaccrccagtccaaaggagtcagactctccagctggtcctgcccgccagtactacaccaagggcaacctggtccggatatgcctcggrgctgtgatcctaataatcctggcggggtttctggcagaggactggcacagccggaggaagcgcctgcggcacaggggcagggctgtgcagaggccgcttccgcccctsccgcccctcccgcwgacccggaaatcahacgggggtcaggatggaggccgacaggatgttcacagccgcgggttatgttcatgaccgctgaaccccaggcacggtcgtatccaagggagggatcatggcatgggaggcgactcaaagactggcgtgtgtggagcgtggaagcaggagggcagaggctacagctgtggaaacgaggccatgctgcctcctcctggtgttccatcagggagccgttcggccagtgtctgtctgtctgtctgcctctctgtctgagggcaccctccatttgggatggaaggaatctgtggagaccccatcctcctccctgcacactgtggatgacatggtaccctggctggaccacatactggcctctttcttcaacctctctaatatgggctccagacggatctctaaggttcccagctctcagggttgactctgttccatcctctgtgcaaaatcctccygtgcttccctttggccctctgtgctcttgtctggttttccccagaaactctcaccctcactccatctcccactgcggtctaacaaatctcctttcgtctctcagaacgggtcttgcaggcagtttgggtatgtcattcattttccttagtgtaaaactagcacgttgcccgcttcccttcacattagaaaacaagatcagcctgtgcaacatggtgaaacctcatctctaccaacaaaacaaaaaaacacaaaaattagccaggtgtggtggtgcatccctatactcccagcaactcrgggggctgaggtgggagaatggcttgagcctgggaggcagaggttgcagtgagctgagatcacaccactgcactctagctcgggtgaygaagcctgacyttgtctcaaaaaatacagggatgaatatgtcaattaccctgatttgatcatagcacgttgtatacatgtactgcaatattgctgtccaccccataaatatgtacaattmtgtatacatttttaaaatcataaaaataagataatgcaccgtctccacccctctcatatttactttctgaaggaaatgttaggtcttctcaaggtaaagttctatatttattatagcgtttaggcatttcttgaccatctaatgagtgtaaaactgtaccactgggccaagtgcagtggatcatgtctgtaatcctagcactgtgggaggccaaggcaggaggatcgcttgagcccaggagttcaagaccagcctgggcaacatagtgagaccccatctctacttaaaataaagaagataaaaattgtttt

SEQ ID NO: 119 - DNA, 2268 bp, Homo sapiens
  misc_feature (1)...(2268): n = A,T,C or G, or insertion/deletion polymorphism (see Tables 1-2)
acagagctcaggacagggctgaggaaccatgtctccatccccgaccgccctcttctgtcttgggctgtgtctggggcgtgtgccagcgcagagtggaccgctccccaagccctccctccaggctctgcccagctccctggtgcccctggagaagccagtgaccctccggtgccagggacctccgggcgtggacctgtaccgcctggagaagctgagttccagcaggtaccaggatcaggcagtcctcttcatcccggccatgaagagaagtctggctggacgctaccgctgctcctaccagaacggaagcctctggtccctgcccagcgaccagctggagctcgttgccacgggagtttttgccaaaccctcgctctcagcccagcccggcccggcggtgtcgtcaggaggggacgtaaccctacagtgtcagactcggtatggctttgaccaatttgctctgtacaaggaaggggaccctgcgccctacaagaatcccgagagatggtacmgggctagtttncccatcatcacrgtgaccgccgcccacagcggaacctaccgatgctacagcttctccagcagggacccatacctgtggtcrgcccccagcgaccccctggagcttgtggtcacaggaacctctgtgacccccagccggttaccaacagaaccaccttccycggtagcagaattctcagaagccaccgctgaactgaccgtctcattcacaaacraagtcttcacaactgagacttctaggagtatcaccrccagtccaaaggagtcagactctccagctggtgagtcctgcccgccagtactacaccaagggcaacctggtccggatatgcctcggrgctgtgatcctaataatcctggcggggtttctggcagaggactggcacagccggaggaagcgcctgcggcacaggggcagggctgtgcagaggccgcttccgcccctsccgcccctcccgcwgacccggaaatcahacgggggtcaggatggaggccgacaggatgttcacagccgcgggttatgttcatgaccgctgaaccccaggcacggtcgtatccaagggagggatcatggcatgggaggcgactcaaagactggcgtgtgtggagcgtggaagcaggagggcagaggctacagctgtggaaacgaggccatgctgcctcctcctggtgttccatcagggagccgttcggccagtgtctgtctgtctgtctgcctctctgtctgagggcaccctccatttgggatggaaggaatctgtggagaccccatcctcctccctgcacactgtggatgacatggtaccctggctggaccacatactggcctctttcttcaacctctctaatatgggctccagacggatctctaaggttcccagctctcagggttgactctgttccatcctctgtgcaaaatcctccygtgcttccctttggccctctgtgctcttgtctggttttccccagaaactctcaccctcactccatctcccactgcggtctaacaaatctcctttcgtctctcagaacgggtcttgcaggcagtttgggtatgtcattcattttccttagtgtaaaactagcacgttgcccgcttcccttcacattagaaaacaagatcagcctgtgcaacatggtgaaacctcatctctaccaacaaaacaaaaaaacacaaaaattagccaggtgtggtggtgcatccctatactcccagcaactcrgggggctgaggtgggagaatggcttgagcctgggaggcagaggttgcagtgagctgagatcacaccactgcactctagctcgggtgaygaagcctgacyttgtctcaaaaaatacagggatgaatatgtcaattaccctgatttgatcatagcacgttgtatacatgtactgcaatattgctgtccaccccataaatatgtacaattmtgtatacatttttaaaatcataaaaataagataatgcaccgtctccacccctctcatatttactttctgaaggaaatgttaggtcttctcaaggtaaagttctatatttattatagcgtttaggcatttcttgaccatctaatgagtgtaaaactgtaccactgggccaagtgcagtggatcatgtctgtaatcctagcactgtgggaggccaaggcaggaggatcgcttgagcccaggagttcaagaccagcctgggcaacatagtgagaccccatctctacttaaaataaagaagataaaaattgttttaaaa

SEQ ID NO: 120 - DNA, 2652 bp, Homo sapiens
gagacagtcacgttgatggtgacagcagcagtgaccgtagcagcctagaggtggccgaatgcttactctaatgggctggcccatccctgagtgtctagagttcccagcccgcttaaggaaggaaggaaaacacaggcagctctaagtgtacgacgagggaggtctcatcggcgaatttcactctgtcgccaggctggaatgcagtagggcaatctcggctcactgcaacctccacctcccgagttcaagtgatgctcctgcttcrgcctcctgagtagctgggactacagaactgcgtagcgccttatacgctgcggcaagtgtgacgtcattcgaacaaaccataggccccgcccccggactagccacgcccacaggctcctgaaaccaccaatcccagctgtgacagcgctcaggaccgatgctcataggtcccgtccctaggatccccgccccctccgcccgcgccccgcccctcgcagcccagttccggacgcgggcccagccgcgcctgcgcytccgctcgcctgtggctgcgtcgcgcgctcttcctcggagctayccaggcggctggtgtgcagcaagctccgcgccgacccckgacgcctgacgcctgacgcctgctmcccggcccsgcatgagccgctacctgctgccgctgtcggcgctgggcacggtagcaggcgccgccgtgctgctcaaggactatgtcaccggtggggcttgccccagcaaggccaccatccctgggaagacggtcatcgtgacgggygccaacacaggcatcgggaagcagaccgccttggaactggccaggagaggaggcaacatcatcctggcctgccgagacatggagaagtgtgaggcggcagcaaaggacatccgcggggagaccctcaatcaccatgtcaamrcccggcacctggacttggcttccctcaagtctatccgagagtttgcagcaaagatcattgaagaggaggagcgagtggacattctaatcaacaacgcgggtgtgatgcggtgcccccactggaccaccgaggacggcttcgagatgcagtttggcgttaaccacctgggtcactttctcttgacaaacttgctgctggacaagctgaaagcctcagccccttcgcggatcatcaacctctcgtccctggcccatgttgctgggcacatagactttgacgacttgaactggcagacgaggaagtataacaccaaagccgcctactgccagagcaagctygccatcgtcctcttcaccaaggagytgagccggcggctgcaaggctctggtgtgactgtcaacgccctgcaccccggcgtggccaggacagagctgggcagacacacgggcatccatggctccaccttctccagcaccacactcgggcccatcttctggctgctggtcaagagccccgagctggccgcccagcccagcacatacctggccgtggcggaggaactggcggatgtttccggaaagtacttcgatggactcaaacagaaggccccggcccccgaggctgaggatgaggaggtggcccggaggctttgggctgaaagtgcccgcctggtgggcttagaggctccctctgtgagggagcagccmctccccagataacctctggagcagatttgaaagccaggatggcgcctccagaccgaggacagctgtccgccatgcccgcagcttcctggcactacctgagccgggagacccaggactggcggccgccatgcccgcagtaggttctagggggcggtgctggccgcagtggactggcctgcaggtgagcactgcccygggctctggctggttccgtctgctctgctgccagcaggggagaggggccatctgatgcttcccctgggaatctaaactgggaatggccgaggaggaaggggctcygtgcacttgcaggccacgtcaggagagccagcggtgcctgtcggggagggttccaaggtgctccgtgaagagcatgggcaagttgtctgacacttggtggattcttgggtccctgtgggaccttgtgcatgcatggtcctctctgagccttggtttcttcagcagygagatgctcagaataactgctgtctcccatgatggtgtggtacagcgagctgttgtctggctatggcatggctgtgccgggggtgtttgctgagggcttcctgtgccagagcccagccagagagcaggtgcaggtgtcatccygagttcaggctctgcacggcatggagtgggaaccccaccagctgctgctacaggacctgggattgcctgggactcccaccttcctatcaattctcatggtagtccaaactgcagactctcaaacttgctcatttaaaagaaaaaaaaaagaagaaaatgtacccgagtcgtagattttatttttcctctgtgcatgggtgaatgcccatgagctgaacaaaggcaactcatggctttattccttttaggaaacaaggcatcagtttatcaccagggcaacaggccatgcaaaagttcagacttggccgggcgcggtggatcacgaggtcaggagatcgagaccatcctggctaacacaatgaaaccctgtttctactaaaaaaatacaaaaaattagctgggcatggtggtgggcgcctgta

SEQ ID NO: 121 - DNA, 2346 bp, Homo sapiens
agtcacgttgatggtgacagcagcagtgaccgtagcagcctagaggtggccgaatgcttactctaatgggctggcccatccctgagtgtctagagttcccagcccgcttaaggaaggaaggaaaacacaggcagctctaagtgtacgacgagggaggtctcatcggcggtgaggaagcccaggcgggtccccttcccagctgaaaggggttcggaatttcactctgtcgccaggctggaatgcagtagggcaatctcggctcactgcaacctccacctcccgagttcaagtgatgctcctgcttcrgcctcctgagtagctgggactacagggactatgtcaccggtggggcttgccccagcaaggccaccatccctgggaagacggtcatcgtgacgggygccaacacaggcatcgggaagcagaccgccttggaactggccaggagaggaggcaacatcatcctggcctgccgagacatggagaagtgtgaggcggcagcaaaggacatccgcggggagaccctcaatcaccatgtcaamrcccggcacctggacttggcttccctcaagtctatccgagagtttgcagcaaagatcattgaagaggaggagcgagtggacattctaatcaacaacgcgggtgtgatgcggtgcccccactggaccaccgaggacggcttcgagatgcagtttggcgttaaccacctgggtcactttctcttgacaaacttgctgctggacaagctgaaagcctcagccccttcgcggatcatcaacctctcgtccctggcccatgttgctgggcacatagactttgacgacttgaactggcagacgaggaagtataacaccaaagccgcctactgccagagcaagctygccatcgtcctcttcaccaaggagytgagccggcggctgcaaggctctggtgtgactgtcaacgccctgcaccccggcgtggccaggacagagctgggcagacacacgggcatccatggctccaccttctccagcaccacactcgggcccatcttctggctgctggtcaagagccccgagctggccgcccagcccagcacatacctggccgtggcggaggaactggcggatgtttccggaaagtacttcgatggactcaaacagaaggccccggcccccgaggctgaggatgaggaggtggcccggaggctttgggctgaaagtgcccgcctggtgggcttagaggctccctctgtgagggagcagccmctccccagataacctctggagcagatttgaaagccaggatggcgcctccagaccgaggacagctgtccgccatgcccgcagcttcctggcactacctgagccgggagacccaggactggcggccgccatgcccgcagtaggttctagggggcggtgctggccgcagtggactggcctgcaggtgagcactgcccygggctctggctggttccgtctgctctgctgccagcaggggagaggggccatctgatgcttcccctgggaatctaaactgggaatggccgaggaggaaggggctcygtgcacttgcaggccacgtcaggagagccagcggtgcctgtcggggagggttccaaggtgctccgtgaagagcatgggcaagttgtctgacacttggtggattcttgggtccctgtgggaccttgtgcatgcatggtcctctctgagccttggtttcttcagcagygagatgctcagaataactgctgtctcccatgatggtgtggtacagcgagctgttgtctggctatggcatggctgtgccgggggtgtttgctgagggcttcctgtgccagagcccagccagagagcaggtgcaggtgtcatccygagttcaggctctgcacggcatggagtgggaaccccaccagctgctgctacaggacctgggattgcctgggactcccaccttcctatcaattctcatggtagtccaaactgcagactctcaaacttgctcatttaaaagaaaaaaaaaagaagaaaatgtacccgagtcgtagattttatttttcctctgtgcatgggtgaatgcccatgagctgaacaaaggcaactcatggctttattccttttaggaaacaaggcatcagtttatcaccagggcaacaggccatgcaaaagttcagacttggccgggcgcggtggatcacgaggtcaggagatcgagaccatcctggctaacacaatgaaaccctgtttctactaaaaaaatacaaaaaattagctgggcatggtggtgggcgcctgtaagagatgtgggtgcctgggctgtgcccagtcactgaaatggcacacctgatgctacctgttcact

SEQ ID NO: 122 - DNA, 2758 bp, Homo sapiens
agtcacgttgatggtgacagcagcagtgaccgtagcagcctagaggtggccgaatgcttactctaatgggctggcccatccctgagtgtctagagttcccagcccgcttaaggaaggaaggaaaacacaggcagctctaagtgtacgacgagggaggtctcatcggcggtgaggaagcccaggcgggtccccttcccagctgaaaggggttcggaatttcactctgtcgccaggctggaatgcagtagggcaatctcggctcactgcaacctccacctcccgagttcaagtgatgctcctgcttcrgcctcctgagtagctgggactacagaactgcgtagcgccttatacgctgcggcaagtgtgacgtcattcgaacaaaccataggccccgcccccggactagccacgcccacaggctcctgaaaccaccaatcccagctgtgacagcgctcaggaccgatgctcataggtcccgtccctaggatccccgccccctccgcccgcgccccgcccctcgcagcccagttccggacgcgggcccagccgcgcctgcgcytccgctcgcctgtggctgcgtcgcgcgctcttcctcggagctayccaggcggctggtgtgcagcaagctccgcgccgacccckgacgcctgacgcctgacgcctgctmcccggcccsgcatgagccgctacctgctgccgctgtcggcgctgggcacggtagcaggcgccgccgtgctgctcaaggactatgtcaccggtggggcttgccccagcaaggccaccatccctgggaagacggtcatcgtgacgggygccaacacaggcatcgggaagcagaccgccttggaactggccaggagaggaggcaacatcatcctggcctgccgagacatggagaagtgtgaggcggcagcaaaggacatccgcggggagaccctcaatcaccatgtcaamrcccggcacctggacttggcttccctcaagtctatccgagagtttgcagcaaagatcattgaagaggaggagcgagtggacattctaatcaacaacgcgggtgtgatgcggtgcccccactggaccaccgaggacggcttcgagatgcagtttggcgttaaccacctgggtcactttctcttgacaaacttgctgctggacaagctgaaagcctcagccccttcgcggatcatcaacctctcgtccctggcccatgttgctgggcacatagactttgacgacttgaactggcagacgaggaagtataacaccaaagccgcctactgccagagcaagctygccatcgtcctcttcaccaaggagytgagccggcggctgcaaggctctggtgtgactgtcaacgccctgcaccccggcgtggccaggacagagctgggcagacacacgggcatccatggctccaccttctccagcaccacactcgggcccatcttctggctgctggtcaagagccccgagctggccgcccagcccagcacatacctggccgtggcggaggaactggcggatgtttccggaaagtacttcgatggactcaaacagaaggccccggcccccgaggctgaggatgaggaggtggcccggaggctttgggctgaaagtgcccgcctggtgggcttagaggctccctctgtgagggagcagccmctccccagataacctctggagcagatttgaaagccaggatggcgcctccagaccgaggacagctgtccgccatgcccgcagcttcctggcactacctgagccgggagacccaggactggcggccgccatgcccgcagtaggttctagggggcggtgctggccgcagtggactggcctgcaggtgagcactgcccygggctctggctggttccgtctgctctgctgccagcaggggagaggggccatctgatgcttcccctgggaatctaaactgggaatggccgaggaggaaggggctcygtgcacttgcaggccacgtcaggagagccagcggtgcctgtcggggagggttccaaggtgctccgtgaagagcatgggcaagttgtctgacacttggtggattcttgggtccctgtgggaccttgtgcatgcatggtcctctctgagccttggtttcttcagcagygagatgctcagaataactgctgtctcccatgatggtgtggtacagcgagctgttgtctggctatggcatggctgtgccgggggtgtttgctgagggcttcctgtgccagagcccagccagagagcaggtgcaggtgtcatccygagttcaggctctgcacggcatggagtgggaaccccaccagctgctgctacaggacctgggattgcctgggactcccaccttcctatcaattctcatggtagtccaaactgcagactctcaaacttgctcatttaaaagaaaaaaaaaagaagaaaatgtacccgagtcgtagattttatttttcctctgtgcatgggtgaatgcccatgagctgaacaaaggcaactcatggctttattccttttaggaaacaaggcatcagtttatcaccagggcaacaggccatgcaaaagttcagacttggccgggcgcggtggatcacgaggtcaggagatcgagaccatcctggctaacacaatgaaaccctgtttctactaaaaaaatacaaaaaattagctgggcatggtggtgggcgcctgtaagagatgtgggtgcctgggctgtgcccagtcactgaaatggcacacctgatgctacctgttcact

SEQ ID NO: 123 - DNA, 2281 bp, Homo sapiens
agtcacgttgatggtgacagcagcagtgaccgtagcagcctagaggtggccgaatgcttactctaatgggctggcccatccctgagtgtctagagttcccagcccgcttaaggaaggaaggaaaacacaggcagctctaagtgtacgacgagggaggtctcatcggcggtgaggaagcccaggcgggtccccttcccagctgaaaggggttcggaatttcactctgtcgccaggctggaatgcagtagggcaatctcggctcactgcaacctccacctcccgagttcaagtgatgctcctgcttcrgcctcctgagtagctgggactacagggactatgtcaccggtggggcttgccccagcaaggccaccatccctgggaagacggtcatcgtgacgggygccaacacaggcatcgggaagcagaccgccttggaactggccaggagaggaggcaacatcatcctggcctgccgagacatggagaagtgtgaggcggcagcaaaggacatccgcggggagaccctcaatcaccatgtcaamrcccggcacctggacttggcttccctcaagtctatccgagagtttgcagcaaagatcattgaagaggaggagcgagtggacattctaatcaacaacgcgggtgtgatgcggtgcccccactggaccaccgaggacggcttcgagatgcagtttggcgttaaccacctgggtcactttctcttgacaaacttgctgctggacaagctgaaagcctcagccccttcgcggatcatcaacctctcgtccctggcccatgttgctgggcacatagactttgacgacttgaactggcagacgaggaagtataacaccaaagccgcctactgccagagcaagctygccatcgtcctcttcaccaaggagytgagccggcggctgcaaggctctggtgtgactgtcaacgccctgcaccccggcgtggccaggacagagctgggcagacacacgggcatccatggctccaccttctccagcaccacactcgggcccatcttctggctgctggtcaagagccccgagctggccgcccagcccagcacatacctggccgtggcggaggaactggcggatgtttccggaaagtacttcgatggactcaaacagaaggccccggcccccgaggctgaggatgaggaggtggcccggaggctttgggctgaaagtgcccgcctggtgggcttagaggctccctctgtgagggagcagccmctccccagataacctctggagcagatttgaaagccaggatggcgcctccagaccgaggacagctgtccgccatgcccgcagcttcctggcactacctgagccgggagacccaggactggcggccgccatgcccgcagtaggttctagggggcggtgctggccgcagtggactggcctgcaggtgagcactgcccygggctctggctggttccgtctgctctgctgccagcaggggagaggggccatctgatgcttcccctgggaatctaaactgggaatggccgaggaggaaggggctcygtgcacttgcaggccacgtcaggagagccagcggtgcctgtcggggagggttccaaggtgctccgtgaagagcatgggcaagttgtctgacacttggtggattcttgggtccctgtgggaccttgtgcatgcatggtcctctctgagccttggtttcttcagcagygagatgctcagaataactgctgtctcccatgatggtgtggtacagcgagctgttgtctggctatggcatggctgtgccgggggtgtttgctgagggcttcctgtgccagagcccagccagagagcaggtgcaggtgtcatccygagttcaggctctgcacggcatggagtgggaaccccaccagctgctgctacaggacctgggattgcctgggactcccaccttcctatcaattctcatggtagtccaaactgcagactctcaaacttgctcatttaaaagaaaaaaaaaagaagaaaatgtacccgagtcgtagattttatttttcctctgtgcatgggtgaatgcccatgagctgaacaaaggcaactcatggctttattccttttaggaaacaaggcatcagtttatcaccagggcaacaggccatgcaaaagttcagacttggccgggcgcggtggatcacgaggtcaggagatcgagaccatcctggctaacacaatgaaaccctgtttctactaaaaaaatacaaaaaattagctgggcatggtggtgggcgcctgta

SEQ ID NO: 124 - DNA, 2717 bp, Homo sapiens
gagacagtcacgttgatggtgacagcagcagtgaccgtagcagcctagaggtggccgaatgcttactctaatgggctggcccatccctgagtgtctagagttcccagcccgcttaaggaaggaaggaaaacacaggcagctctaagtgtacgacgagggaggtctcatcggcgaatttcactctgtcgccaggctggaatgcagtagggcaatctcggctcactgcaacctccacctcccgagttcaagtgatgctcctgcttcrgcctcctgagtagctgggactacagaactgcgtagcgccttatacgctgcggcaagtgtgacgtcattcgaacaaaccataggccccgcccccggactagccacgcccacaggctcctgaaaccaccaatcccagctgtgacagcgctcaggaccgatgctcataggtcccgtccctaggatccccgccccctccgcccgcgccccgcccctcgcagcccagttccggacgcgggcccagccgcgcctgcgcytccgctcgcctgtggctgcgtcgcgcgctcttcctcggagctayccaggcggctggtgtgcagcaagctccgcgccgacccckgacgcctgacgcctgacgcctgctmcccggcccsgcatgagccgctacctgctgccgctgtcggcgctgggcacggtagcaggcgccgccgtgctgctcaaggactatgtcaccggtggggcttgccccagcaaggccaccatccctgggaagacggtcatcgtgacgggygccaacacaggcatcgggaagcagaccgccttggaactggccaggagaggaggcaacatcatcctggcctgccgagacatggagaagtgtgaggcggcagcaaaggacatccgcggggagaccctcaatcaccatgtcaamrcccggcacctggacttggcttccctcaagtctatccgagagtttgcagcaaagatcattgaagaggaggagcgagtggacattctaatcaacaacgcgggtgtgatgcggtgcccccactggaccaccgaggacggcttcgagatgcagtttggcgttaaccacctgggtcactttctcttgacaaacttgctgctggacaagctgaaagcctcagccccttcgcggatcatcaacctctcgtccctggcccatgttgctgggcacatagactttgacgacttgaactggcagacgaggaagtataacaccaaagccgcctactgccagagcaagctygccatcgtcctcttcaccaaggagytgagccggcggctgcaaggctctggtgtgactgtcaacgccctgcaccccggcgtggccaggacagagctgggcagacacacgggcatccatggctccaccttctccagcaccacactcgggcccatcttctggctgctggtcaagagccccgagctggccgcccagcccagcacatacctggccgtggcggaggaactggcggatgtttccggaaagtacttcgatggactcaaacagaaggccccggcccccgaggctgaggatgaggaggtggcccggaggctttgggctgaaagtgcccgcctggtgggcttagaggctccctctgtgagggagcagccmctccccagataacctctggagcagatttgaaagccaggatggcgcctccagaccgaggacagctgtccgccatgcccgcagcttcctggcactacctgagccgggagacccaggactggcggccgccatgcccgcagtaggttctagggggcggtgctggccgcagtggactggcctgcaggtgagcactgcccygggctctggctggttccgtctgctctgctgccagcaggggagaggggccatctgatgcttcccctgggaatctaaactgggaatggccgaggaggaaggggctcygtgcacttgcaggccacgtcaggagagccagcggtgcctgtcggggagggttccaaggtgctccgtgaagagcatgggcaagttgtctgacacttggtggattcttgggtccctgtgggaccttgtgcatgcatggtcctctctgagccttggtttcttcagcagygagatgctcagaataactgctgtctcccatgatggtgtggtacagcgagctgttgtctggctatggcatggctgtgccgggggtgtttgctgagggcttcctgtgccagagcccagccagagagcaggtgcaggtgtcatccygagttcaggctctgcacggcatggagtgggaaccccaccagctgctgctacaggacctgggattgcctgggactcccaccttcctatcaattctcatggtagtccaaactgcagactctcaaacttgctcatttaaaagaaaaaaaaaagaagaaaatgtacccgagtcgtagattttatttttcctctgtgcatgggtgaatgcccatgagctgaacaaaggcaactcatggctttattccttttaggaaacaaggcatcagtttatcaccagggcaacaggccatgcaaaagttcagacttggccgggcgcggtggatcacgaggtcaggagatcgagaccatcctggctaacacaatgaaaccctgtttctactaaaaaaatacaaaaaattagctgggcatggtggtgggcgcctgtaagagatgtgggtgcctgggctgtgcccagtcactgaaatggcacacctgatgctacctgttcact

SEQ ID NO: 125 - DNA, 3243 bp, Homo sapiens
ggtytgtggatgcgtttactctcatgtaagtcaacaayatcctgggattgggacmcactttctgggcactgctggccagtcccaaaatggaacataaggaagtggttcttctacttcttttatttctgaaatcaggtcaaggagagcctctggatgactatgtraatrcccaggggscttcactgttcagtgtcactragaagcagctgggagcaggaagyakagaagaatgtgcagcaaaatgtgaggaggacgaagaattcacctgcagggcattccaatatcacagtaaagagcaacartgtgtgataatggctgaaaacargaagtcctccataatcattaggatgagagatgyagttttatttgaaaagaaagtgtatctytcagagtgcaagactgggaatggaaagaaytacagagggacgatgtccaaaacaaaaaatggcatcacctgtcaaaaatggagttccacttctccccrcaracctagattctcacctgctacacacccctcagagggactggaggagaactactgmaggaatccagacaacgatccgcaggggccctggtgctatactactgatccagaasagagatatgactactgcgacattcttgagtgtgaagaggaatgtatgcattgcagtggagaaaactatgacggcaaaatttccaagaccatgtctggactggaatgccaggcctgggactctcagagcccacacgctcatggatacattccttccaaatttccaaacaagaacctgaagaagaattactgtcgtaaccccgatagggagctgcggccttggtgtttcaccaccgaccccaacaagcgctgggaactttgygacatcccccgctgcacaacacctccaccatcttctggtcccacctaccagtgtctgaagggaacaggtgaaaactatcgcgggaatgtggctgttaccgtgtccgggcacacctgtcagcactggagtgcacagacccctcacacacataacaggacaccagaaaacttyccctgcaaaaatttggatgaaaactactgccgcaatcctgacggaaaaagggccccatggtgccatacaaccaacagccaagtgcggtgggagtactgtaagataccgtcctgtgactcctccccagtatccacggaacarttggctcccacagcaccacctgagctaacccctgtggtccaggactgctaccatggtgatggacagagctaccgaggcacatcctccaccaccaccacaggaaagaagtgtcagtcttggtcatctatgacaccacacyggcaccagaagaccccagaaaactacccaaatgctggcctgacaatgaactactgcaggaatccagatgccgataaaggcccctggtgttttaccacagaccccagcgtcaggtgggagtactgcaacctgaaaawatgctcaggaacagaagcgagtgttgtagcacctccgcctgttgtcctgcttccaratgtagagactccttccgaagaagactgtatgtttgggaatgggaaaggataccgaggcaagagggygaccactgttactgggacgccatgccaggactgggctgcccaggagccccatagacacagcattttcactccagagacaaatccacgggcgggtctggaaaaaaattactgccrtaaccctgatggtgatgtaggtggtccctggtgctacacgacaaatccaagaaaactttacgactactgtgatgtccctcagtgtgcggccccttcatttgattgtgggaagcctcaagtggagccgaagaaatgtcctggaagggttgtaggggggtgtgtggcccacccacattcctggccctggcaagtcagtcttagaacaaggtttggaatgcacttctgtggaggcaccttgatatccccagagtgggtgttgactrctgcccactgcttggagaagtccccaaggccttcatcctacaaggtcatcctgggtgcacaccaagaagtgaatctcgaaccrcatgttcaggaaatagaagtgtctaggctgttcttggagcccacacgaaaagatattgccttgctaaagctaagcagtcctgccgtcatcactgacaaagtaatcccagcttgtctgccatccccaaattatgtggtcrcyraccggaccgaatgtttcatcactggctggggagaaacccaaggtacttttggagctggccttctcaaggaagcccagctccctgtgattgagaataaagtgtgcaatcgctatgagtttctgaatggaagagtccaatccaccgaactctgtgctgggcatttggccggaggcacygacagttgccagggtgacagtggaggkcctctggtttgcttcgagaaggacaaatacattttacaaggagtcacttcttggggtcttggctgtgcacgccccaataagccyggtgtctatgttcgtgtttcaaggtttgttacttggattgagggagtgatgagaaataattaattggacgggagacagagtgacgcactgactcacctagaggctggracgtgggtagggatttagcatgctggaaataactggcagtaatcaaacgaagacactgtccccagctaccagctacgccaaacctcggcattttttgtgttattttctgactgctggattctgtagtaaggtgacatagctatgacatttgttaaaaataaactctgtacttaactttgatttgagtaaattttggttttggtcttcaacattttcatgctctttgttcaccccaccaattttaaatgggcagatggggggatttagctgcttttgataaggaacagctgcacaaaggactgagcaggctgcaaggtcacagaggggagagccaagaagttgtccacgcatttacctcatcagctaacgagggcttgacatgcatttttactgtctttattcctgacactgagatgaatgttttcaaagctgcaacatgyatggggagtcatgcraaccgattctgttattgggaatgaaatctgtcaccgactgcttgacttgagcccaggggacacrgagcagagagctgtatatgatggagtgaacckgtccatggatgtgtaacacaagaccaactgagagtctgaatgttattctggggcacacgtgagtctaggattggtgccaagagcatgtaaatgaacaacaagcaaatattgaaggtggaccacttatt

SEQ ID NO: 126 - DNA, 1182 bp, Homo sapiens
ggtytgtggatgcgtttactctcatgtaagtcaacaayatcctgggattgggacmcactttctgggcactgctggccagtcccaaaatggaacataaggaagtggttcttctacttcttttatttctgaaatcaggtcaaggagagcctctggatgactatgtraatrcccaggggscttcactgttcagtgtcactragaagcagctgggagcaggaagyakagaagaatgtgcagcaaaatgtgaggaggacgaagaattcacctgcagggcattccaatatcacagtaaagagcaacartgtgtgataatggctgaaaacargaagtcctccataatcattaggatgagagatgyagttttatttgaaaagaaagtgtatctytcagagtgcaagactgggaatggaaagaaytacagagggacgatgtccaaaacaaaaaatggcatcacctgtcaaaaatggagttccacttctccccrcaracctaggtaagacattycctttcatctttgtgttcatctactgtaaagttgtccctctgtgtctgtgagggattggttccaggacccctgtggctaccaaaatccatgcttctcaagtcccttatataaaatggtgcagtatttgcatataacctacataccttctcttgtataatccctaatataatgtaaatgctatktaatcrttgttatactgtattgtttttatttgtattatgttttattgtcatattgttattttctgtcatctttttcaagtcttttccatccacagttggttgaatttgtkgatctggaacccatggatacagagggccaactgtatttaggataatttcatcacttttaattcaaaccacaatatgtraataagcagatagaaagaatctttttgatgtcgatgttcaactatttttgkcaccatagtagaacatggttgctttctattttttcttggatatggaggtttcttgaagacytagaacayagaagaatgcctagtttaaaaaaaatcaatgaaactatgagttttaggccaaatctgagaaaagatcaaagatgactaygtttgggactgaagtaagcatatcargttagaactctcatcacatgttcgactcaaattgtggagcaaaagagtaaataagatataaaaatgaaaatgaagatacgtg

SEQ ID NO: 127 - DNA, 1081 bp, Homo sapiens
cacccaggtagtgagctaaatacctactaaataggtcaaggagagcctctggatgactatgtraatrcccaggggscttcactgttcagtgtcactragaagcagctgggagcaggaagyakagaagaatgtgcagcaaaatgtgaggaggacgaagaattcacctgcagggcattccaatatcacagtaaagagcaacartgtgtgataatggctgaaaacargaagtcctccataatcattaggatgagagatgyagttttatttgaaaagaaagtgtatctytcagagtgcaagactgggaatggaaagaaytacagagggacgatgtccaaaacaaaaaatggcatcacctgtcaaaaatggagttccacttctccccrcaracctaggtaagacattycctttcatctttgtgttcatctactgtaaagttgtccctctgtgtctgtgagggattggttccaggacccctgtggctaccaaaatccatgcttctcaagtcccttatataaaatggtgcagtatttgcatataacctacataccttctcttgtataatccctaatataatgtaaatgctatktaatcrttgttatactgtattgtttttatttgtattatgttttattgtcatattgttattttctgtcatctttttcaagtcttttccatccacagttggttgaatttgtkgatctggaacccatggatacagagggccaactgtatttaggataatttcatcacttttaattcaaaccacaatatgtraataagcagatagaaagaatctttttgatgtcgatgttcaactatttttgkcaccatagtagaacatggttgctttctattttttcttggatatggaggtttcttgaagacytagaacayagaagaatgcctagtttaaaaaaaatcaatgaaactatgagttttaggccaaatctgagaaaagatcaaagatgactaygtttgggactgaagtaagcatatcargttagaactctcatcacatgttcgactcaaattgtggagcaaaagagtaaataagatataaaaatgaaaatgaagatacgtg

SEQ ID NO: 128 - DNA, 591 bp, Homo sapiens
ggtytgtggatgcgtttactctcatgtaagtcaacaayatcctgggattgggacmcactttctgggcactgctggccagtcccaaaatggaacataaggaagtggttcttctacttcttttatttctgaaatcaggtcaaggagagcctctggatgactatgtraatrcccaggggscttcactgttcagtgtcactragaagcagctgggagcaggaagyakagaagaatgtgcagcaaaatgtgaggaggacgaagaattcacctgcagggcattccaatatcacagtaaagagcaacartgtgtgataatggctgaaaacargaagtcctccataatcattaggatgagagatgyagttttatttgaaaagaaaggtgagtacattttcttcctcctcctcctactgtcctccccatcctcccrctcttcctctttctctattctatctttaatttataagaccagaggaggaaggyactaycrtgttataaaactgaattctgagttaggacaggatttgattactaactaaccatgtcagcttgagtgtattacttcacctcttagatttaattttttttgttcaa

SEQ ID NO: 129 - DNA, 2425 bp, Homo sapiens
ggtytgtggatgcgtttactctcatgtaagtcaacaayatcctgggattgggacmcactttctgggcactgctggccagtcccaaaatggaacataaggaagtggttcttctacttcttttatttctgaaatcaggtcaaggagagcctctggatgactatgtraatrcccaggggscttcactgttcagtgtcactragaagcagctgggagcaggaagyakagaagaatgtgcagcaaaatgtgaggaggacgaagaattcacctgcagggcattccaatatcacagtaaagagcaacartgtgtgataatggctgaaaacargaagtcctccataatcattaggatgagagatgyagttttatttgaaaagaaagtgtatctytcagagtgcaagactgggaatggaaagaaytacagagggacgatgtccaaaacaaaaaatggcatcacctgtcaaaaatggagttccacttctccccrcaracctagattctcacctgctacacacccctcagagggactggaggagaactactgmaggaatccagacaacgatccgcaggggccctggtgctatactactgatccagaasagagatatgactactgcgacattcttgagtgtgaagaggaatgtatgcattgcagtggagaaaactatgacggcaaaatttccaagaccatgtctggactggaatgccaggcctgggactctcagagcccacacgctcatggatacattccttccaaatttccaaacaagaacctgaagaagaattactgtcgtaaccccgatagggagctgcggccttggtgtttcaccaccgaccccaacaagcgctgggaactttgygacatcccccgctgcacaacacctccaccatcttctggtcccacctaccagtgtctgaagggaacaggtgaaaactatcgcgggaatgtggctgttaccgtgtccgggcacacctgtcagcactggagtgcacagacccctcacacacataacaggacaccagaaaacttyccctgcaaaaatttggatgaaaactactgccgcaatcctgacggaaaaagggccccatggtgccatacaaccaacagccaagtgcggtgggagtactgtaagataccgtcctgtgactcctccccagtatccacggaacarttggctcccacagcaccacctgagctaacccctgtggtccaggactgctaccatggtgatggacagagctaccgaggcacatcctccaccaccaccacaggaaagaagtgtcagtcttggtcatctatgacaccacacyggcaccagaagaccccagaaaactacccaaatgctggcctgacaatgaactactgcaggaatccagatgccgataaaggcccctggtgttttaccacagaccccagcgtcaggtgggagtactgcaacctgaaaawatgctcaggaacagaagcgagtgttgtagcacctccgcctgttgtcctgcttccaratgtagagactccttccgaagaagactgtatgtttgggaatgggaaaggataccgaggcaagagggygaccactgttactgggacgccatgccaggactgggctgcccaggagccccatagacacagcattttcactccagagacaaatccacgggcgggtctggaaaaaaattactgccrtaaccctgatggtgatgtaggtggtccctggtgctacacgacaaatccaagaaaactttacgactactgtgatgtccctcagtgtggtaggttgccttctttttggtaaggaaactgcttacttaatatggatttgcaacmaaaaaggaaaagggcttctgagcagactgcttctggggaggagatagctgccctctccatcagaccccactcttcatcatgggcatcttgaatctgccctactattggccacatttgttagaggaacacctgcccatcgccccaggcacacataaataaaataaatgtaaaattcccaaagagcaagcttagaggtaatctagtcagccccaggatggtcccactgaatgctgccatgtctagcgtgggatgcatgaaaaatttagagtcattcggatgaaaaactttccctttccacagctgagaagtaagaaagaaaatacaaacagcaggaaacaggtaagcatgtaacgcacattgtaaacctcagatggccatcctaggaattcaatgaaaggtagtgcagctctttagccccagatggcctttcttataagtttactactcacaagtcacattagtgacatagcttagagactgcttgttgggttccatcctcattgctctgagactcttgttgggagtatgaggcttggatcaggggaaggggagttgacattagttcttaaagaattggaataacaaatccatgggtatttctga

SEQ ID NO: 130 - DNA, 1894 bp, Homo sapiens
gacgtgtatcgctgccgtcaagatggaggggcctttgtccgtgttcggtgaccgcagcactggggaaacgatccgctcccaaaacggcatgcccaagagaatcgtaaatgcaaaaattgcttgccttgacttcagcctgcaaaaaacaaaaatgaagcttggtgtacaggtggtcattacagaccctgaaaaactggaccaaattagacagagagaatcagatatcaccaaggagagaattcagaagatcctggcaactggtgccaatgttattctaaccactggtggaattgatgatatgtgtctgaagtattttgtggaggctggtgctatggcagttagaagagttttaaaaagggaccttaaacgcattgccaaagcttctggagcaactattctgtcaaccctggccaatttggaaggtgaagaaacttttgaagctgcaatgttgggacaggcagaagaagtggtacaggagagaatttgtgatgatgagctgatcttaatcaaaaattgtgtagtgaagagagttttggagtcaaaatctgtggttcccggtgggggtgctgtagaagcagccctttccatataccttgaaaactatgcaaccagcatggggtctcgggaacagcttgcgattgcagagtttgcaagatcacttcttgttattcccaatacactagcagttaatgctgcccaggactccacagatctggttgcaaaattaagagcttttcataatgaggcccaggttaacccagaacgtaaaaatctaaaatggattggtcttgatttgagcaatggtaaacctcgagacaacaaacaagcaggggtgtttgaaccaaccatagttaaagttaagagtttgaaatttgcaacagaagctgcaatcmccattcttcgaattgatgatcttattaaattacatccagaaagtaaagatgataaacatggaagttatgaagatgctgttcactctggagcccttwwtgattgatctgatgttccttttatttataacaatgttaratgcaattgtcttgtaccktgagttgagtattacacattaaagtaaagtacaagctgtaaacttgggtttttgtgatgtaggaaatggtttccatctgtactttggtcctctgatttcacatattgcaacctagtactttattagtttaaaaagaaattgaggttgttcaaagtttaagcaattcattctctctgaacacacattgctattcccatcccacccccaatgcacagggctgcaacaccacgayttctgcccattctctccagtgtgtgtaacagggtcacaagaattcgacagccagatgctccaagagggtggcccaaggctatagcccctccttcaatattgacggtcctattcccataatggaaggctccacacccacttgggaccaggaaactatccgtgctaaaggtgtaagyccacgtttatcagcttctgacttcttcataagaacracagctgcagcaccatcatttattcctgaagcattggctggggtgactgttcccgttccatcagtaagaaagtaaggctttagcttggacatggcttctatgttgctcccatggcgaggaaactcatctgttttaacttcaataagacctyttctagttgacaccaaaactggtacaatctctttgtcaaaatggccagctttctgtgcattctctgtcctgttctgggacagaactgcaaccttgtcctgatcttctctactcacttgccattttttggctacattttcagctgtaatacccatatgacagttgtgaaatgcatctgtaagaccatcacagagtatactgtcagtcagtggcatctcacctatctttactcctgttctcaagtaagccaagt

SEQ ID NO: 131 - DNA, 2439 bp, Homo sapiens
cctgttgtccctgcctctttttccttcccgccgtgccccgcggccgggccggggcagccgggaagcgggtggggtggtgtgttacccagtakctcctgggacatcgctcgggtacgctccacrycgtcgcagccactgctgtggtcgccggtcgsccgaggggccgcgatactggttgcccgcggtgtaagcagaattcgacgtgtatcgctgccgtcaagatggaggggcctttgtccgtgttcggtgaccgcagcactggggaaacgatccgctcccaaaacgttatggctgcagcttcgattgccaatattgtaaaaagttctcttggtccagttggcttggataaaatgttggtggatgatattggtgatgtaaccattactaacgatggtgcaaccatcctgaagttactggaggtagaacatcctgcagctaaagttctttgtgagctggctgatctgcaagacaaagaagttggagatggaactacttcagtggttattattgcagcagaactcctaaaaaatgcagatgaattagtcaaacagaaaattcatcccacatcagttattagtggctatcgacttgcttgcaaggaagcagtgcgttatatcaatgaaaacctaattgttaacacagatgaactgggaagagattgcctgattaatgctgctaagacatccatgtcttccaaaatcattggaataaatggtgatttctttgctaacatggtagtagatgctgtacttgctattaaatacacagacataagaggccagccacgctatccagtcaactctgttaatattttgaaagcccatgggagaagtcaaatggagagtatgctcatcagtggctatgcactcaactgtgtggtgggatcccagggcatgcccaagagaatcgtaaatgcaaaaattgcttgccttgacttcagcctgcaaaaaacaaaaatgaagcttggtgtacaggtggtcattacagaccctgaaaaactggaccaaattagacagagagaatcagatatcaccaaggagagaattcagaagatcctggcaactggtgccaatgttattctaaccactggtggaattgatgatatgtgtctgaagtattttgtggaggctggtgctatggcagttagaagagttttaaaaagggaccttaaacgcattgccaaagcttctggagcaactattctgtcaaccctggccaatttggaaggtgaagaaacttttgaagctgcaatgttgggacaggcagaagaagtggtacaggagagaatttgtgatgatgagctgatcttaatcaaaaatactaaggctcgtacgtctgcatcgattatcttacgtggggcaaatgatttcatgtgtgatgagatggagcgctctttacatgatgcactttgtgtagtgaagagagttttggagtcaaaatctgtggttcccggtgggggtgctgtagaagcagccctttccatataccttgaaaactatgcaaccagcatggggtctcgggaacagcttgcgattgcagagtttgcaagatcacttcttgttattcccaatacactagcagttaatgctgcccaggactccacagatctggttgcaaaattaagagcttttcataatgaggcccaggttaacccagaacgtaaaaatctaaaatggattggtcttgatttgagcaatggtaaacctcgagacaacaaacaagcaggggtgtttgaaccaaccatagttaaagttaagagtttgaaatttgcaacagaagctgcaatcmccattcttcgaattgatgatcttattaaattacatccagaaagtaaagatgataaacatggaagttatgaagatgctgttcactctggagcccttwwtgattgatctgatgttccttttatttataacaatgttaratgcaattgtcttgtaccktgagttgagtattacacattaaagtaaagtacaagctgtaaacttgggtttttgtgatgtaggaaatggtttccatctgtactttggtcctctgatttcacatattgcaacctagtactttattagtttaaaaagaaattgaggttgttcaaagtttaagcaattcattctctctgaacacacattgctattcccatcccacccccaatgcacagggctgcaacaccacgayttctgcccattctctccagtgtgtgtaacagggtcacaagaattcgacagccagatgctccaagagggtggcccaaggctatagcccctccttcaatattgacctarcgggggagaaaagatttagattgtttattcttctgtggacacagtttaaaatcttaaacttgtctttttcctcttaatgtatcagcatgctaccctttcaaactcaaattttcattttaactgcttaggaataaatttacacctttgtgaaaattca

SEQ ID NO: 132 - DNA, 2789 bp, Homo sapiens
cctgttgtccctgcctctttttccttcccgccgtgccccgcggccgggccggggcagccgggaagcgggtggggtggtgtgttacccagtakctcctgggacatcgctcgggtacgctccacrycgtcgcagccactgctgtggtcgccggtcgsccgaggggccgcgatactggttgcccgcggtgtaagcagaattcgacgtgtatcgctgccgtcaagatggaggggcctttgtccgtgttcggtgaccgcagcactggggaaacgatccgctcccaaaacgttatggctgcagcttcgattgccaatattgtaaaaagttctcttggtccagttggcttggataaaatgttggtggatgatattggtgatgtaaccattactaacgatggtgcaaccatcctgaagttactggaggtagaacatcctgcagctaaagttctttgtgagctggctgatctgcaagacaaagaagttggagatggaactacttcagtggttattattgcagcagaactcctaaaaaatgcagatgaattagtcaaacagaaaattcatcccacatcagttattagtggctatcgacttgcttgcaaggaagcagtgcgttatatcaatgaaaacctaattgttaacacagatgaactgggaagagattgcctgattaatgctgctaagacatccatgtcttccaaaatcattggaataaatggtgatttctttgctaacatggtagtagatgctgtacttgctattaaatacacagacataagaggccagccacgctatccagtcaactctgttaatattttgaaagcccatgggagaagtcaaatggagagtatgctcatcagtggctatgcactcaactgtgtggtgggatcccagggcatgcccaagagaatcgtaaatgcaaaaattgcttgccttgacttcagcctgcaaaaaacaaaaatgaagcttggtgtacaggtggtcattacagaccctgaaaaactggaccaaattagacagagagaatcagatatcaccaaggagagaattcagaagatcctggcaactggtgccaatgttattctaaccactggtggaattgatgatatgtgtctgaagtattttgtggaggctggtgctatggcagttagaagagttttaaaaagggaccttaaacgcattgccaaagcttctggagcaactattctgtcaaccctggccaatttggaaggtgaagaaacttttgaagctgcaatgttgggacaggcagaagaagtggtacaggagagaatttgtgatgatgagctgatcttaatcaaaaatactaaggctcgtacgtctgcatcgattatcttacgtggggcaaatgatttcatgtgtgatgagatggagcgctctttacatgatgcactttgtgtagtgaagagagttttggagtcaaaatctgtggttcccggtgggggtgctgtagaagcagccctttccatataccttgaaaactatgcaaccagcatggggtctcgggaacagcttgcgattgcagagtttgcaagatcacttcttgttattcccaatacactagcagttaatgctgcccaggactccacagatctggttgcaaaattaagagcttttcataatgaggcccaggttaacccagaacgtaaaaatctaaaatggattggtcttgatttgagcaatggtaaacctcgagacaacaaacaagcaggggtgtttgaaccaaccatagttaaagttaagagtttgaaatttgcaacagaagctgcaatcmccattcttcgaattgatgatcttattaaattacatccagaaagtaaagatgataaacatggaagttatgaagatgctgttcactctggagcccttwwtgattgatctgatgttccttttatttataacaatgttaratgcaattgtcttgtaccktgagttgagtattacacattaaagtaaagtacaagctgtaaacttgggtttttgtgatgtaggaaatggtttccatctgtactttggtcctctgatttcacatattgcaacctagtactttattagtttaaaaagaaattgaggttgttcaaagtttaagcaattcattctctctgaacacacattgctattcccatcccacccccaatgcacagggctgcaacaccacgayttctgcccattctctccagtgtgtgtaacagggtcacaagaattcgacagccagatgctccaagagggtggcccaaggctatagcccctccttcaatattgacggtcctattcccataatggaaggctccacacccacttgggaccaggaaactatccgtgctaaaggtgtaagyccacgtttatcagcttctgacttcttcataagaacracagctgcagcaccatcatttattcctgaagcattggctggggtgactgttcccgttccatcagtaagaaagtaaggctttagcttggacatggcttctatgttgctcccatggcgaggaaactcatctgttttaacttcaataagacctyttctagttgacaccaaaactggtacaatctctttgtcaaaatggccagctttctgtgcattctctgtcctgttctgggacagaactgcaaccttgtcctgatcttctctactcacttgccattttttggctacattttcagctgtaatacccatatgacagttgtgaaatgcatctgtaagaccatcacagagtatactgtcagtcagtggcatctcacctatctttactcctgttctcaagtaagccaagt

SEQ ID NO: 133 - DNA, 291 bp, Homo sapiens
atgatggtccgcgccgccgagacgatgaccacaggatctgagcctgcattcatcttgcttctcctgccgccgtctgccctgcgctgcctgcaagctaggcaaagctcctcctcgcagcccacaggcctgccgcgggcgggacctgagctcaggactggaatcccacgggcgagaatctcgagtgcgagcccggcccgcrgcgggtctcagcacagctctgatgggtccttttgctctcggcggcttcgggaggtcctatgcgtttctcctggcgccagtcattcgctcgcg

SEQ ID NO: 134 - DNA, 1575 bp, Homo sapiens
agataaaaccacatgagactttattggcaattgtgagttactctttccacatggcgacagcctgcaatgggggctccagtttggcttgctggtctcttctgggcagcgggcactgctgtctctactttccaggatggcagttggcccgaggggctctaacctgccattggaacctcacccatagcccagaagcctcattcacaacccttcccagactccactccaacttagagaacctgaaaaatggacatgtrgacatgtatctgaaagaaagtctaggcggttgcrcttagacaagggcctacggctttattaacagatgtcgaggaagctttcaggtgctggyagccatgagggtctggttttaaggatggcctttaaggaaaggccgtggcaggcgggctgagaggggckgctccagctcagccctgcccacagcacaggctcacagaagccgagatccacatcaccgcctggcatgcaaaggagttgaagacaaaaccatttttttccagcttctctacaaagccaattactaagcaacagttattaaagtgaagtatccatttacagactgacacaaatatcaaaaataagcagcttagatgagtacagaggctggagtgcattttctgctaacaaaaaccactgtgatattctcccagtttagagggaaaagtctatctcaggccgactcagatgtggcagaaataagtgggtctgaagtgcattttcagttgtttctgcccggaaggagcccggatgatacaaacaggtctggggttcgtggctctggcaagcgcccagagacaactgcgtctctgccaggacgctcatcctcactgcggctgtctgggcagatggctgttggcaggctagggacgacgatgaaaaactgacaatattttaaaaacccagtagggtccacagcagtgtttgaaatgacaggctttttatttctcaggaacagccgagatgacctccagaggtttccagcgaagctgtaacaatccaccctgcagctctatgacagggaggagggcgaatcaaatccatcatcttacgccagacttcagccctgcgggagctgctgcctccaaagaaagcggggacctgggcggactgcgtctctcccccgtgtggagaacgtgacagatgtgaaggttgggctgacagacacacggcctgcagcagcccagccagtcccccacagcatcgagccaagtcatttaaaaaggatttaggccactgcctttttctgagggaggagcggccagcatgtgccccgcggctcactgggcctgtctaatcacacagcagtggcaaaaggagtatctgccagacgcttcctatcactctattctgtctcctcatccacctgaagttcaccccgtttccccaatgacttagaatggctttgtgcttagttttaattgtagtttgtgctattctgtgaattaacaattcaaacaaaataagaaagccatgttgttaaacagtagaggagccrgggactctgtctccattctctcatcacacacaagtcatgcatctaccaaaaaaaaaaaaacaaaa

SEQ ID NO: 135 - DNA, 816 bp, Homo sapiens
  misc_feature (1)...(816): n = A,T,C or G, or insertion/deletion polymorphism (see Tables 1-2)
ggccgagtgtgtcgccgcggccatcaggcacttctccttcctgcccttgtatgaagaaggatgtgtttgcttccccttgtgccatgattgtaaatttcctgaggcctcctcagccctgcagaactggctagagcaatgtatcttaggctcacttaaggaagctgtagagatgagcccaaggagggaaaccagaagagccccccaggctcaccagttgtttgttggctccctacaaacatgtcattcaagtggctaatcttacaacagcacaaattcatctaaccagaaagagaagaggaggctccaaaggcacttgactactgagcatcaccctggacgtgtacaagtctgcgtccttattgttttcttcattgggccgaactttntggtcctcatccaacagctcttctatcaygtgttcgaaagtgtcagccaatgatgtcaagcctcttgaacctgccttgggcccattcacgctctccagagtcccatgggtccgcacacctggagatactctattatagcaaagaagaawgataatttcattgagccatcctgttttacaggaaattctgcaagtggcaacgtgggtccattccgtgtgtgtcactagagctggcgcaagcccatggccatggtgaggcagcgtttccactggaactaatctgatacctgcaccagctcttgcaactgtgcagtgttcccactgcaaactacggatggggattttccctcctggtgagtcaaaatgaacaagaaataccccaggacctcccttccctccttggccattaatgagatgaaggcaattaactc

SEQ ID NO: 136 - DNA, 736 bp, Homo sapiens
  misc_feature (1)...(736): n = A,T,C or G, or insertion/deletion polymorphism (see Tables 1-2)
ctagtatcgcgagatcaggaaggtggccgagtgtgtcgccgcggccatcaggcacttctccttcctgcccttgtatgaagaaggatgtgtttgcttccccttgtgccatgattgtaaatttcctgaggcctcctcagccctgcagaactggggttatagccatgtgactgatcttcgtccaagaatatgtaaagaaaaagtgttgagttggcttttagggctagagcaatgtatcttaggctcacttaaggaagctgtagagatgagcccaaggagggaaaccagaagagccccccaggctcaccagttgtttgttggctccctacaaacatgtcattcaagtggctaatcttacaacagcacaaattcatctaaccagaaagagaagaggaggctccaaaggcacttgactactgagcatcaccctggacgtgtacaagtctgcgtccttattgttttcttcattgggccgaactttntggtcctcatccaacagctcttctatcaygtgttcgaaagtgtcagccaatgatgtcaagcctcttgaacctgccttgggcccattcacgctctccagagtcccatgggtccgcacacctggagatactctattatagcaaagaagaawgataatttcattgagccatcctgttttacagtattgaattattaccacaaggtaccaaccatatatgcatacttaatagggtattttgtcaaaactatgcatgaaggt

SEQ ID NO: 137 - DNA, 1278 bp, Homo sapiens
atggcccaagctgacatcgtgctratcrgattggcagtcatgggccagaacttaattctgaccrtgaaagaccatggctttgtggtctgtgcttttaataggactgtctccgaagtggaygatttcttggccaatgaggcaaagggaaccaaagtggtgggtgcccagtccctgaaagagatggtctccaagctgaagaagccccagcggatcatcctcctggtgaaggctgggcaagctgtggattatttcatcaaaaaactgataccattgttggacattggtgacatcatcattgatggaggaaattctgaatatagggacaccacaagacggtgccaagacctcaaggccaagggaattttatttgtggggagcggagtcagtgrtggagaggaaggggcctggatagagtrtggggacatgcagctgatctgtgaggcataccacctgatgaaagacgtgctgggcatggcacaggacaagatggcccaggcctttgaggattggaataagacagagctagactcattcctgattgaaatcasagccaatattctcaagttccaaggygctratggcaaacacttgctgccaaagatcagggacagtgcagggcagaagggcatggggaagtggaccaccatctctgccctggagtacggcataccygtcaccctcattggagaagccgtctttgcttggtgcctgtcatctctgaaggatgggagaattcaagctagcaaaaagctgaagggtccccaaaagttccagtttgatggctttatgctgctaaggcagggagccaccgagtttggctggaccctcaattatggtgayattgccctgatgtggagagggggctgcattattagaagtgtattcctaggaaagataaaggatgcrtttgatcgaaacccagaacctcagaacctcctactggacgacttcttaagtcagctgttgaaaaccgctaggactcttggtggtgggcagtcagcactggggtccaggctggcattcccatgccctgttttgtcactgccctctccttctatgacaagtacagacacgagatgcttccagccaacctcatccaggctcagcgggattcctytggggctcacacctatgaactcttggccaaaccagggcagtttatccacaccaactggacaggccacggtggcagtgtatcatcctcgtcatacaatgcctgatgatgatgatgctgctcctgtcaccctccacgattccacagaccaggacattccatga

SEQ ID NO: 138 - DNA, 2264 bp, Homo sapiens
ccggcgcctcggagcgggtggcgctcaagaaggagatcgggctgctgagcgcctgcaccatcatcatcgctttctgctgctctggagcgccgtcctcatcatgtaccccaccagccttgctgtcatctccatgaccttctccaactacgtgctgcagcccgtgttccccaactgcatcccccccaccacagcctcccgggtgctgtccatggcctgcctgatgctcctgacatgggtgaacagctccagtgtgcgctgggccacgcgcatccaggacatgttcacaggcgggaagctgctggccttgtccctcatcatcggcgtgggccttctccagatcttccaaggacacttcgaggagctgaggcccagcaatgcctttgctttctggatgacgccctccgtgggacacctggccctggccttcctccagggctccttcgccttcagtggctggaacttcctcaactatgtcaccgaggagatggttgacgcccgaaagaacctacctcgcgccatcttcatctccatcccactggtgaccttcgtgtacacgttcaccaacattgcctacttcacggccatgtccccccaggagctgctctcctccaatgcggtggctgtggtgagtgggcccctgctcggtccctggctcctgcccaggcccctgccccggccttacacayggcctctctactgygcccacccagaccttcggggagaagctgctgggctacttttcttgggtcatgcctgtctccgtggctctgtcaaccttcggagggatcaatggttacctgttcacctactccaggtgactgcactggggagaygtgggcatggggagggaaggctggggtgcaggtgtgcaccagtcatgccgtgggccagaggaagggacacctgccgggggaggggtctgcctgaagctgggatgatgatcccacacggtaacaagtgtctgatcacaactgggaggcaaagaaagcaagaggcaggcaggctggatgagggggagaactgtccagtggggctgctgggcccggagcaggaggtcagaggcgacagcttaagagggacatcaggtccaaagctgagacccaggatgtggccagtgcccatatctgtccccaacgctaggctgtgcttctctggagcccgcgaggggcacctgcccagcctgctggccatgatccacgtcagacactgcacccccatccccgccctcctcgtctgttgyggggccacagccgtcatcatgctcgtgggcgacacgtacacgctcatcaactatgtgtccttcatcaactacctctgctacggcgtcaccatcctgggcctgctgctgctgcgctggaggcrgcctgcactccacaggcccatcaaggtgaaccttctcatccccgtggcgtacttggtcttctgggccttcctgctggtcttcagcttcatctcagagcctatggtctgtggggtcggcgtcatcatcatccttackggggtgcccattttctttctgggagtgttctggagaagcaaaccaaagtgtgtgcacagactcacagagtccatgacacactggggccaggagctgtgtttcgtggtctacccccaggacgcccccgaagaggaggagaatggcccctgcccaccctccctgctgcctgccacagacaagccctcgaagccacaatgagatttttgtagagactgaagcagttgtttctgtttacatgttgtttattgaggaggtgttttggcaaaaaagttttgttttgtttttttctggaaaaaaaagaaaaaagatacgactctcagaagcctgttttaaggaagccctaaaatgtggactgggtttcctgtcttagcactgccctgctagctyttcctgaaaaggcctataaataaacagggctggctgttcgctcgtgctatggggagtccctgatgggcacagaygggagtggctggggcgtacctcggtgggtgcacacatgttgctggccaggaagatgccgtggcaggccctggaggaggctcttgacattagggggctttgctgcttgacacaggcgctccctaccatggcacccagagtccccctgccctaaagggatgtcgaggatggggtagcagctcagtccgcccctaccccaggcccctcgatgccagtctgagctcggccacccaggagagctcaggggctccaggctgggattgyctttcttcccgtaaatcaccacagagtgaaggtcaggacttca

SEQ ID NO: 139 - DNA, 1920 bp, Homo sapiens
ggtccctgtgtctcgggcagcaatgctgccccctttcctgccccaacatccccagcagacacaagagatggagactatgagctgctctcgtggctgggtctcgggggtcctgcaccctcaggagctgacgctgacgcactccactgcctgtcaccaggaacctacctcgcgccatcttcatctccatcccactggtgaccttcgtgtacacgttcaccaacattgcctacttcacggccatgtccccccaggagctgctctcctccaatgcggtggctgtggtgagtgggcccctgctcggtccctggctcctgcccaggcccctgccccggccttacacayggcctctctactgygcccacccagaccttcggggagaagctgctgggctacttttcttgggtcatgcctgtctccgtggctctgtcaaccttcggagggatcaatggttacctgttcacctactccaggtgactgcactggggagaygtgggcatggggagggaaggctggggtgcaggtgtgcaccagtcatgccgtgggccagaggaagggacacctgccgggggaggggtctgcctgaagctgggatgatgatcccacacggtaacaagtgtctgatcacaactgggaggcaaagaaagcaagaggcaggcaggctggatgagggggagaactgtccagtggggctgctgggcccggagcaggaggtcagaggcgacagcttaagagggacatcaggtccaaagctgagacccaggatgtggccagtgcccatatctgtccccaacgctaggctgtgcttctctggagcccgcgaggggcacctgcccagcctgctggccatgatccacgtcagacactgcacccccatccccgccctcctcgtctgttgyggggccacagccgtcatcatgctcgtgggcgacacgtacacgctcatcaactatgtgtccttcatcaactacctctgctacggcgtcaccatcctgggcctgctgctgctgcgctggaggcrgcctgcactccacaggcccatcaaggtgaaccttctcatccccgtggcgtacttggtcttctgggccttcctgctggtcttcagcttcatctcagagcctatggtctgtggggtcggcgtcatcatcatccttackggggtgcccattttctttctgggagtgttctggagaagcaaaccaaagtgtgtgcacagactcacagagtccatgacacactggggccaggagctgtgtttcgtggtctacccccaggacgcccccgaagaggaggagaatggcccctgcccaccctccctgctgcctgccacagacaagccctcgaagccacaatgagatttttgtagagactgaagcagttgtttctgtttacatgttgtttattgaggaggtgttttggcaaaaaagttttgttttgtttttttctggaaaaaaaagaaaaaagatacgactctcagaagcctgttttaaggaagccctaaaatgtggactgggtttcctgtcttagcactgccctgctagctyttcctgaaaaggcctataaataaacagggctggctgttcgctcgtgctatggggagtccctgatgggcacagaygggagtggctggggcgtacctcggtgggtgcacacatgttgctggccaggaagatgccgtggcaggccctggaggaggctcttgacattagggggctttgctgcttgacacaggcgctccctaccatggcacccagagtccccctgccctaaagggatgtcgaggatggggtagcagctcagtccgcccctaccccaggcccctcgatgccagtctgagctcggccacccaggagagctcaggggctccaggctgggattgyctttcttcccgtaaatcaccacagagtgaaggtcaggacttca

SEQ ID NO: 140 - DNA, 2284 bp, Homo sapiens
cccgggcccggagccagcgcatgcgcccgcctgtgggcgctgtcccggctgcgagggccgtgagctcacggaccgacggaccgacgggcggccggccggacagacggggcagcgcagggagcggggacgcggcgggacagcgacatggccggccacacgcagcagccgagcgggcgcgggaaccccaggcctgcgccctcgccctccccagtcccagggaccgtccccggcgcctcggagcgggtggcgctcaagaaggagatcgggctgctgagcgcctgcaccatcatcatcgggaacatcatcggctcgggcatcttcatctcgcccaagggggtcctggagcactcaggctccgtgggtctggccctgttcgtctgggtcctgggtgggggcgtgacggctctgggctccctctgctatgcagagctgggagtcgccatccccaagtctggcggggactacgcctacgtcacagagatcttcggggrcctggctggctttctgctgctctggagcgccgtcctcatcatgtaccccaccagccttgctgtcatctccatgaccttctccaactacgtgctgcagcccgtgttccccaactgcatcccccccaccacagcctcccgggtgctgtccatggcctgcctgatgctcctgacatgggtgaacagctccagtgtgcgctgggccacgcgcatccaggacatgttcacaggcgggaagctgctggccttgtccctcatcatcggcgtgggccttctccagatcttccaaggacacttcgaggagctgaggcccagcaatgcctttgctttctggatgacgccctccgtgggacacctggccctggccttcctccagggctccttcgccttcagtggctggaacttcctcaactatgtcaccgaggagatggttgacgcccgaaagaacctacctcgcgccatcttcatctccatcccactggtgaccttcgtgtacacgttcaccaacattgcctacttcacggccatgtccccccaggagctgctctcctccaatgcggtggctgtgaccttcggggagaagctgctgggctacttttcttgggtcatgcctgtctccgtggctctgtcaaccttcggagggatcaatggttacctgttcacctactccaggctgtgcttctctggagcccgcgaggggcacctgcccagcctgctggccatgatccacgtcagacactgcacccccatccccgccctcctcgtctgttgyggggccacagccgtcatcatgctcgtgggcgacacgtacacgctcatcaactatgtgtccttcatcaactacctctgctacggcgtcaccatcctgggcctgctgctgctgcgctggaggcrgcctgcactccacaggcccatcaaggtgaaccttctcatccccgtggcgtacttggtcttctgggccttcctgctggtcttcagcttcatctcagagcctatggtctgtggggtcggcgtcatcatcatccttackggggtgcccattttctttctgggagtgttctggagaagcaaaccaaagtgtgtgcacagactcacagagtccatgacacactggggccaggagctgtgtttcgtggtctacccccaggacgcccccgaagaggaggagaatggcccctgcccaccctccctgctgcctgccacagacaagccctcgaagccacaatgagatttttgtagagactgaagcagttgtttctgtttacatgttgtttattgaggaggtgttttggcaaaaaagttttgttttgtttttttctggaaaaaaaagaaaaaagatacgactctcagaagcctgttttaaggaagccctaaaatgtggactgggtttcctgtcttagcactgccctgctagctyttcctgaaaaggcctataaataaacagggctggctgttcgctcgtgctatggggagtccctgatgggcacagaygggagtggctggggcgtacctcggtgggtgcacacatgttgctggccaggaagatgccgtggcaggccctggaggaggctcttgacattagggggctttgctgcttgacacaggcgctccctaccatggcacccagagtccccctgccctaaagggatgtcgaggatggggtagcagctcagtccgcccctaccccaggcccctcgatgccagtctgagctcggccacccaggagagctcaggggctccaggctgggattgyctttcttcccgtaaatcaccacagagtgaaggtcaggacttca

SEQ ID NO: 141 - DNA, 3852 bp, Homo sapiens
ccgcagggcccgtgacgccgcggccgatgtggccgcgcgcgccctacgggcctgcaccgccaccgcacaaagacgcctcgggagccgccgcctgcacccgggccgcagcagccacgccagccggagcccgagccctagcccgagcccgagcccgagccgcagccagagccagagccggagccgcagccggaaccggagccggagccgcggggcaggaggcggcgcccgcgggcggccgggcccggcatggagaagcgcgcggccgcggggctggagggcgcgccgggcgcccgggcgcagctggccgtcgtctgtctggtgaacatctttctcaccgggagactcagcagtgcggttcctgccttagcggcctgcagtgggaagctggagcagcacacrgagcggcgtggggtcatctacagcccggcctggcccctcaactacccgccaggcaccaactgcagytggtacatccagggygaccgtggtgacatgattaccatcagcttccgcaactttgacgtggaggagtcccaccagtgctccctggactggctcctgctgggcccagcagccccaccccgccaggaggccttccgcctctgtggctccgccatcccacctgccttcatctctgcccgcgaccatgtctggattttcttccactcagacgcctccagctccggccaggcccagggcttccgtctgtcttacatccgagggaagctggrccaggcatcctgccaggcagatgagttccgctgtgacaacggcaagtgcctgcccggcccgtggcagtgcaacacggtggacgagtgtggagacggctctgatgagggcaactgctcggcgcccgcctccgagcctccaggcagcctgtgcccyggggggaccttcccatgcagcggggcgcgctccacgcgytgcctgcctgtggagcggcgctgtgacggcttgcaggactgcggcgacggctcggatgaggcgggctgccccgacctggcgtgcggccggcggctgggcagcttctacggctcctttgcctccccagacctgttcggygccgctcgcgggccctcagaccttcactgcacgtggctggtggacacacaggactcccggcgggtgctgctgcagctggaactgcggctgggctatgacgactacgtgcaggtatacgagggcctgggygagcgcggggaccgcctgctgcagacgctgtcctaccgcagcaaccaccggcccgtgagcctggaggccgcccagggccgcctcacygtggcctaccacgcgcgcgcccgcagcgccggccacggcttcaatgccacctaccaggtgaagggctattgcctcccctgggagcagccgtgcgggagcagtagtgacagtgacgggggcagcctgggcgaccagggctgcttctcagagccacagcgctgtgatggctggtggcattgtgccagcggycgagacgagcagggctgccctgcctgcccgcccgaccagtacccctgcgagggtggcagtggtctgtgctacacgcctgccgaccgctgcaacaaccagaaaagctgtcccgacggcgccgacgagaagaactgcttctcctgccagcccggcaccttccactgcggtaccaacctgtgcatcttcgagacgtggcgctgtgacggccaggaagactgccaggacggcagcgatgagcatgggtgcctggccgccgtgccccgcaaggtcatcacggcggcgctcattggcagcctggtgtgtggcctgctgctggtcatcgcgctgggctgcgccttcaagctctactcactgcgcacgcaggaatacagggccttcgagacccagatgacgcgcctggaggctgagttygtgcggcgggaggcacccccatcctatggtcagctcatcgcccagggcctcattccacccgtggaggactttcctgtctacagtgcgtcccaggcctctgtgctgcagaatcttcgcacagccatgcggagacagatgcgtcggcacgcctcccgccgggggccctcccgccgccgcctcggccgcctctggaaccggctctttcaccggccgcgggcgccccgaggccagatcccactgctgaccgcagcacgcccctcacagaccgtgctgggcgatggcttcctccagcctgctccaggggctgcccccgaccccccagcaccgctcatggacacaggcagcaccagggcggccggagacaggccccccagtgcccccggccgtgcaccggaggtgggaccttcagggccacccttgccctcgggcctgcgagacccagagtgcaggcccgtggacaaggacagaaaggtctgcagggagccactggyagacggcccagctcctgcagatgcacctcgggagccctgctcagcccaggacccgcacccccaggtctccactgccagcagcaccctgggcccccactcgccagagccactgggggtctgcaggaaccccccgcccccctgctccccaatgctggaggccagcgatgatgaggccctgttggtcwgttgaccgctgggctcgctggtgaccgccacagccccgctttgtaaccagggaatacacagtcatttctaccctgcctctgcgtcctttcttatggagaggccctccggggaccccagcggaggggctggcccctaagccagctggctgcactggtgggcgggagctgtgggactgaacggggcggggggggagaagagtggagtggtgagcccgtctgcagggtcccattgtacacaagcaccctggggtctcacttctctccccccactccattctgggaacccatttccagagaagcaggggaccagagcctttttgcttcatctgccctgcagtggcaacagctgcccctagagctgggagttgtcatgaggatggggccgggccatggggacgctgggtctcatccgtggtgactattttgctcacgcctcaccctcttcctgtccagcaaggcctctggaggacctgggttgggtggctcctgccaaaccctcatgcccctggccaggcaggcgccctttgccctccctgaaggtccaatctcctgggcacygtggaagggctggggtgtgtgcctgctgtacatgaagcccctggagttccctgcaggcctcaaagcccccaggacatgctgctctgtgctttctggggacagagaggccgaggcaccaacagcartggccacgtctgttccatcctatctcagggcctcggtttccccacctgtaagccagggtgagactgtgggctctgaagtcctgaccttcactctgtggtgatttacgggaagaaagrcaatcccagcctggagcccctgagctctcctgggtggccgagctcagactggcatcgaggggcctggggtaggggcggactgagctgctaccccatcctcgacatccctttagggcagggggactctgggtgccatggtagggagcgcctgtgtcaagcagcaaagccccctaatgtcaagagcctcctccagggcctgccacggcatcttcctggccagcaacatgtgtgcacccaccgaggtacgccccagccactcccrtctgtgcccatcagggactccccatagcacgagcgaacagccagccctgtttatttataggccttttcaggaaragctagcagggcagtgctaagacaggaaacccagtccacattttagggcttccttaaaacaggcttctgagagtcgtatcttttttcttttttttccagaaaaaaacaaaacaaaacttttttgccaaaacacctcctcaataaacaacatgtaaacagaaa

SEQ ID NO: 142 - DNA, 2089 bp, Homo sapiens
gctttcccctgcctgcctgtctctagtttctctcacatccctttttttttttcytttctctagccaccctgaagggtcccttcccaagcccttagggaccgcagaggacttggggaccagcaagcaacccccagggcacgagaagagctcttgctgtctgccctgcctcaccctgccccacrccaggcccggtggcccccagctgyatcaagtggaggcggaggaggaggcggaggagggtggcaccatgggcccgggcggtgccctccatgcccgggggatgaagacactgctgccatggacagcccgtgccagccgcagcccctaagtcaggctctccctcagttaccagggtcttcgtcagagcccttggagcctgagcctggccgggccaggatgggagtggagagttacctgccctgtcccctgctcccctcctaccactgtccaggagtgcctagtgaggcctcggcagggagtgggacccccagagccacagccacctctaccactgccagccctcttcgggacggttttggcgggcaggatggtggtgagctgcggccgctgcagagtgaaggcgctgcagcgctggtcaccaaggggtgccagcgattggcagcccagggygcacggcctgaggcccccaaacggaaatgggccgaggatggtggggatgccccttcacccagcaaacggccctgggccaggcaagagaaccaggaggcagagcgggagggtggcatgagctgcagctgcagcagtggcagtggtgaggccagtgctgggctgatggaggaggcgctgccctctgcgcccgagcgcctggccctggactatatcgtgccctgcatgcggtactacggcatctgcgtcaaggacagcttcctgggggcagcactgggcggtcgcgtgctggccgaggtggaggccctcaaacggggtgggcgcctgcgagacgggcagctagtgagccagagggcgatcccrccgcgcagcatccgtggggaccagattgcctgggtggaaggccatgaaccaggctgtcgaagcattggtgccctcatggcccatgtggacgccgtcatccgccactgcgcagggcggctgggcagctatgtcatcaaygggcgcaccaaggccatggtggcgtgttacccaggcaacgggctygggtacgtaaggcacgttgacaatccccacggcgatgggcgctgcatcacctgtatctattacctgaatcagaactgggacgttaaggtgcatggcggcctgctgcagatcttccctgagggccggcccgtggtagccaacatcgagccactctttgaccggttgctcattttctggtctgaccggcggaacccccacgaggtgaagccagcctatgccaccaggtaygccatcactgtctggtattttgatgccaaggagcgggcagcagcyaaagacaagtatcagctagcatcaggacagaaaggtgtccaagtacctgtatcacagccgcctacgcccacctagtggccagtcccagagccgcatggcagacagcttaaatgacttcaggagagccctgggcctgtgctggctgctccttccctgccaccgctgctgcttctgactttgcctctgtcctgcctggtgtggagggctctgtctgttgctgaggaccaaggaggagaagagacctttgctgccccatcatgggggctggggttgtcacctggacagggggcagccgtggaggccaccgttaccaactgaagctggrggcctgggtcctaccctgtctggtcatgaccccattaggtatggagagctgggaggaggcattgtcacttcccaccaggatgcaggacttggggttgaggtgagtcatggcctcttgctggcaatggggtgggaggagtacccccaagtcctctcactcctccagcmtggaatgtgaagtgactccccaacccctttggccatggcaggcaccttttggactgggctgccactgcttgggcagagtaaaaggtgccaggaggagcatgggtgtggaagtcctgtcagccaagaaataaaagtttacctcagagctgca

SEQ ID NO: 143 - DNA, 2026 bp, Homo sapiens
ccaccctgaagggtcccttcccaagcccttagggaccgcagaggacttggggaccagcaagcaacccccagggcacgagaagagctcttgctgtctgccctgcctcaccctgccccacrccaggcccggtggcccccagctgyatcaagtggaggcggaggaggaggcggaggagggtggcaccatgggcccgggcggtgccctccatgcccgggggatgaagacactgctgccatggacagcccgtgccagccgcagcccctaagtcaggctctccctcagttaccagggtcttcgtcagagcccttggagcctgagcctggccgggccaggatgggagtggagagttacctgccctgtcccctgctcccctcctaccactgtccaggagtgcctagtgaggcctcggcagggagtgggacccccagagccacagccacctctaccactgccagccctcttcgggacggttttggcgggcaggatggtggtgagctgcggccgctgcagagtgaaggcgctgcagcgctggtcaccaaggggtgccagcgattggcagcccagggygcacggcctgaggcccccaaacggaaatgggccgaggatggtggggatgccccttcacccagcaaacggccctgggccaggcaagagaaccaggaggcagagcgggagggtggcatgagctgcagctgcagcagtggcagtggtgaggccagtgctgggctgatggaggaggcgctgccctctgcgcccgagcgcctggccctggactatatcgtgccctgcatgcggtactacggcatctgcgtcaaggacagcttcctgggggcagcactgggcggtcgcgtgctggccgaggtggaggccctcaaacggggtgggcgcctgcgagacgggcagctagtgagccagagggcgatcccrccgcgcagcatccgtggggaccagattgcctgggtggaaggccatgaaccaggctgtcgaagcattggtgccctcatggcccatgtggacgccgtcatccgccactgcgcagggcggctgggcagctatgtcatcaaygggcgcaccaaggccatggtggcgtgttacccaggcaacgggctygggtacgtaaggcacgttgacaatccccacggcgatgggcgctgcatcacctgtatctattacctgaatcagaactgggacgttaaggtgcatggcggcctgctgcagatcttccctgagggccggcccgtggtagccaacatcgagccactctttgaccggttgctcattttctggtctgaccggcggaacccccacgaggtgaagccagcctatgccaccaggtaygccatcactgtctggtattttgatgccaaggagcgggcagcagcyaaagacaagtatcagctagcatcaggacagaaaggtgtccaagtacctgtatcacagccgcctacgcccacctagtggccagtcccagagccgcatggcagacagcttaaatgacttcaggagagccctgggcctgtgctggctgctccttccctgccaccgctgctgcttctgactttgcctctgtcctgcctggtgtggagggctctgtctgttgctgaggaccaaggaggagaagagacctttgctgccccatcatgggggctggggttgtcacctggacagggggcagccgtggaggccaccgttaccaactgaagctggrggcctgggtcctaccctgtctggtcatgaccccattaggtatggagagctgggaggaggcattgtcacttcccaccaggatgcaggacttggggttgaggtgagtcatggcctcttgctggcaatggggtgggaggagtacccccaagtcctctcactcctccagcmtggaatgtgaagtgactccccaacccctttggccatggcaggcaccttttggactgggctgccactgcttgggcagagtaaaaggtgccaggaggagcatgggtgtggaagtcctgtcagccaagaaataaaagtttacctcagagctgca

SEQ ID NO: 144 - DNA, 2403 bp, Homo sapiens
ggtgaggaggtcgcggggcgagaagggagcgggaggagactaagccggagccggggcgccggcgcgaaccgggcggggtgtgggggcgcgcgccggggcctgccggggcgaccccgggaagggggatgtgggtgcggcgcgggggaggggacgcgcgccggttacgttgggtgccggccgttgtgggggttggggtgggggcggggagcgcgcgccgggcggaggccgagtggagggggaggggagggggtccgagcggcccttaggccctgcccctgtcgcctactgcgctcagaaggggcctcagggcctgccccgggttgggggcgttggggtgccctggatgggggcacctttatctctcgtcctgtctccggccaccctgaagggtcccttcccaagcccttagggaccgcagaggacttggggaccagcaagcaacccccagggcacgagaagagctcttgctgtctgccctgcctcaccctgccccacrccaggcccggtggcccccagctgyatcaagtggaggcggaggaggaggcggaggagggtggcaccatgggcccgggcggtgccctccatgcccgggggatgaagacactgctgccatggacagcccgtgccagccgcagcccctaagtcaggctctccctcagttaccagggtcttcgtcagagcccttggagcctgagcctggccgggccaggatgggagtggagagttacctgccctgtcccctgctcccctcctaccactgtccaggagtgcctagtgaggcctcggcagggagtgggacccccagagccacagccacctctaccactgccagccctcttcgggacggttttggcgggcaggatggtggtgagctgcggccgctgcagagtgaaggcgctgcagcgctggtcaccaaggggtgccagcgattggcagcccagggygcacggcctgaggcccccaaacggaaatgggccgaggatggtggggatgccccttcacccagcaaacggccctgggccaggcaagagaaccaggaggcagagcgggagggtggcatgagctgcagctgcagcagtggcagtggtgaggccagtgctgggctgatggaggaggcgctgccctctgcgcccgagcgcctggccctggactatatcgtgccctgcatgcggtactacggcatctgcgtcaaggacagcttcctgggggcagcactgggcggtcgcgtgctggccgaggtggaggccctcaaacggggtgggcgcctgcgagacgggcagctagtgagccagagggcgatcccrccgcgcagcatccgtggggaccagattgcctgggtggaaggccatgaaccaggctgtcgaagcattggtgccctcatggcccatgtggacgccgtcatccgccactgcgcagggcggctgggcagctatgtcatcaaygggcgcaccaaggccatggtggcgtgttacccaggcaacgggctygggtacgtaaggcacgttgacaatccccacggcgatgggcgctgcatcacctgtatctattacctgaatcagaactgggacgttaaggtgcatggcggcctgctgcagatcttccctgagggccggcccgtggtagccaacatcgagccactctttgaccggttgctcattttctggtctgaccggcggaacccccacgaggtgaagccagcctatgccaccaggtaygccatcactgtctggtattttgatgccaaggagcgggcagcagcyaaagacaagtatcagctagcatcaggacagaaaggtgtccaagtacctgtatcacagccgcctacgcccacctagtggccagtcccagagccgcatggcagacagcttaaatgacttcaggagagccctgggcctgtgctggctgctccttccctgccaccgctgctgcttctgactttgcctctgtcctgcctggtgtggagggctctgtctgttgctgaggaccaaggaggagaagagacctttgctgccccatcatgggggctggggttgtcacctggacagggggcagccgtggaggccaccgttaccaactgaagctggrggcctgggtcctaccctgtctggtcatgaccccattaggtatggagagctgggaggaggcattgtcacttcccaccaggatgcaggacttggggttgaggtgagtcatggcctcttgctggcaatggggtgggaggagtacccccaagtcctctcactcctccagcmtggaatgtgaagtgactccccaacccctttggccatggcaggcaccttttggactgggctgccactgcttgggcagagtaaaaggtgccaggaggagcatgggtgtggaagtcctgtcagccaagaaataaaagtttacctcagagctgca

SEQ ID NO: 145 - DNA, 4014 bp, Homo sapiens
aggccttcccctgtgagggcaggaagtagatactttccttggggccagaggatgctttcacccccaaggtgtgtatatgtgggggaagggtggggccctaaagagcaggttcctgtttctgtgtgagtcccatgtgcttggtgggaggcgctgtgtgagaatgtacagggcaggaggaaacatagcagggctggggtgcagaggaggcccagagcagtgcactccagtctgcaggtactgcactgggcactggggagaccaacctggccccaggggcttccctgtggctgccttccagggcagtactaggtaaacaggtgcctgtgctgatgccatgttgctaggagtggaacggacaatcagccggagtactcaaggtgacccttggtctctgaatcctgaataacaaagagggtcagaaggaagagtgtcccaggccagtgctgaggccttgtggtggcgatgagctcagcctgttgaggcatggagcagagtgatgggagaggcacatgaggttgggggcctttgaggctgtggttgggaatttgtattttctcaggatggagtgaagacctggagaggaggggctctggctgctgtgtggggatgaattgtgggaagagggtgcagcactggaccccttccctgccacccatccacgtgcatcatcagtgtaatctctgattggattcctaattggggaggtcttgcccrtctctagtcagtaactcactgtttctaagcctcctggrccatggcccaattcttctcccagtgaggtggttgctcagagtgccgacccttccatagggagtgagcagtgcaaagaaggtgccccctcctgaaccttgaagtgtagccattagggttttccctggggggccttctcactaattgtactctggtgctgccagagagaaggttgtcagcttcccactgctaggtggcagtagatggtggcagccctctctttccagggcaaggtctggtggatgaggtgcacatggttaatgcagagcagcttaacatccaccacagagggtgagccctgggataatgtgttgggaggcgtcctggggagggtgaggattgaagcagcccagtctgctgtggcgtgcgtgcttggcaagcatcctgttgtggcagtggccactgatgtttgatcgtgaatgtttatcttgggactgtcttgctgggccgggcccataggtgtagctgagcattcgtggggaatggacgccagcagagttgtaccagggcagagaggtcagggcagagaggtcaagacagatggtccgggctggggagaagttgaagggtccttgtgccagtcctcccctttttgtgtgctacctcatcttgccactgcagtgactttgggcagagggtgggacagggaccttttaaaatttttaaatggcatttcagcctgtgctccagttctccatgtggcaggcactgtgctggctgtcttcccagacacttgttatcttgttcacttgttccacaacaacctgtgaaatagctgtgagctccattggatccatggatgaggaacctgagaccaggaagtcacctgcctgatgccacagctcatgtggcagcactgagacttgaaccagggaattgtgtctgcagaagtggctgggccatttcctttacctctcagccacctttctgccagctccctgatgacaaacatcccggggccctggccacagcattgtagggctgggtcaggggagtggcaactgtcaggcagaggaaagaaccctgtagacagagaaaccaagccctgcaatgagtcctgttagatctccaggagttggggctccagaacctcccaagttatgttctcagagagattaattgctaccgctgtaaacagcagtgtttattacccctgctgtacacatcaggcagttgaggcccattcaggtgttggaactggctagggttacccagcaaattatccttggagttggaattaggtctttctattcagactgtagcttttggctcctgttcggaggtctatgggacagataatttagtggggattctttgtagtccagggcagcagttcttaacattgctgcatggtagaattacctgggaagctttaccaatttcaggcccttccttaggccaggtacttcagaacctcagagctccccagggggctccactccacagccaagggtaagaattcctggtctagggctgtgaggccacctccttgcacacctgaaaatgtttaaattggtattattctactgaaatggctgaggtggggtttggggtatcttgaaacaaatcaaactctgttactaattgagccctagctgggtgccaggccccaggtatgtgtgttgggagggagtgggctcttgaggcccaggarctgaggtttctgatagacttggggatgggattttggctgaaaaagaaagtcttttggggcaggagcttggaacccttgacccaaggagtcatggggaagatggggcaaggaggggtgggaaaataggtaattcatggctgcttctctaagatgtgcctgcctagccccagtaaacctacctccctccatccctgccaggccatggtggcgtgttacccaggcaacgggctygggtacgtaaggcacgttgacaatccccacggcgatgggcgctgcatcacctgtatctattacctgaatcagaactgggacgttaaggtaggggtgagggtgagggtgagggtggcgctggggctagggctggggcgggggtggcgtgcgtccactccattttccactctcagcccagattctggcattctcctgtttctcttctcaacacacagcgggcagtgcgatctgccggctcttcctgggaaatggcacctcctcctctctagcggactgtgtggtgggaactcccctctttccgggaatggtgctgtctgcccagccccacccggccttgtaatgaacactttcccccttttcctgtctttagtagcttcctgcccatctccatggtgatgcagtctctgggttgtcattcactttgagagcccgaggggtgggagggagtgatgcaggcagacgctgcgcctcctagtgggctcccggggcaccgtgggaggcagcggctcctggccgtaccagctagcctcatcctttggcctgcccccaggtgcatggcggcctgctgcagatcttccctgagggccggcccgtggtagccaacatcgagccactctttgaccggttgctcattttctggtctgaccggcggaacccccacgaggtgaagccagcctatgccaccaggtaygccatcactgtctggtattttgatgccaaggagcgggcagcagcyaaagacaagtatcagctagcatcaggacagaaaggtgtccaagtacctgtatcacagccgcctacgcccacctagtggccagtcccagagccgcatggcagacagcttaaatgacttcaggagagccctgggcctgtgctggctgctccttccctgccaccgctgctgcttctgactttgcctctgtcctgcctggtgtggagggctctgtctgttgctgaggaccaaggaggagaagagacctttgctgccccatcatgggggctggggttgtcacctggacagggggcagccgtggaggccaccgttaccaactgaagctggrggcctgggtcctaccctgtctggtcatgaccccattaggtatggagagctgggaggaggcattgtcacttcccaccaggatgcaggacttggggttgaggtgagtcatggcctcttgctggcaatggggtgggaggagtacccccaagtcctctcactcctccagcmtggaatgtgaagtgactccccaacccctttggccatggcaggcaccttttggactgggctgccactgcttgggcagagtaaaaggtgccaggaggagcatgggtgtggaagtcctgtcagccaagaaataaaagtttacctcagagctgca

SEQ ID NO: 146 - DNA, 1912 bp, Homo sapiens
cgcggtgggggcggggtatggcgcgctgtgcggcgcagggcggctggcacaaacggcggcgccggggccggaggaaaaagctcgccaccctgaagggtcccttcccaagcccttagggaccgcagaggacttggggaccagcaagcaacccccagggcacgagaagagctcttgctgtctgccctgcctcaccctgccccacrccaggcccggtggcccccagctgyatcaagtggaggcggaggaggaggcggaggagggtggcaccatgggcccgggcggtgccctccatgcccgggggatgaagacactgctgccatggacagcccgtgccagccgcagcccctaagtcaggctctccctcagttaccagggtcttcgtcagagcccttggagcctgagcctggccgggccaggatgggagtggagagttacctgccctgtcccctgctcccctcctaccactgtccaggagtgcctagtgaggcctcggcagggagtgggacccccagagccacagccacctctaccactgccagccctcttcgggacggttttggcgggcaggatggtggtgagctgcggccgctgcagagtgaaggcgctgcagcgctggtcaccaaggggtgccagcgattggcagcccagggygcacggcctgaggcccccaaacggaaatgggccgaggatggtggggatgccccttcacccagcaaacggccctgggccaggcaagagaaccaggaggcagagcgggagggtggcatgagctgcagctgcagcagtggcagtggtgaggccagtgctgggctgatggaggaggcgctgccctctgcgcccgagcgcctggccctggactatatcgtgccctgcatgcggtactacggcatctgcgtcaaggacagcttcctgggggcagcactgggcggtcgcgtgctggccgaggtggaggccctcaaacggggtgggcgcctgcgagacgggcagctagtgagccagagggcgatcccrccgcgcagcatccgtggggaccagattgcctgggtggaaggccatgaaccaggctgtcgaagcattggtgccctcatggcccatgtggacgccgtcatccgccactgcgcagggcggctgggcagctatgtcatcaaygggcgcaccaaggccatggtggcgtgttacccaggcaacgggctygggtacgtaaggcacgttgacaatccccacggcgatgggcgctgcatcacctgtatctattacctgaatcagaactgggacgttaaggtgcatggcggcctgctgcagatcttccctgagggccggcccgtggtagccaacatcgagccactctttgaccggttgctcattttctggtctgaccggcggaacccccacgaggtgaagccagcctatgccaccaggtaygccatcactgtctggtattttgatgccaaggagcgggcagcagcyaaagacaagtatcagctagcatcaggacagaaaggtgtccaagtacctgtatcacagccgcctacgcccacctagtggccagtcccagagccgcatggcagacagcttaaatgacttcaggagagccctgggcctgtgctggctgctccttccctgccaccgctgctgcttctgactttgcctctgtcctgcctggtgtggagggctctgtctgttgctgaggaccaaggaggagaagagacctttgctgccccatcatgggggctggggttgtcacctggacagggggcagccgtggaggccaccgttaccaactgaagctggrggcctgggtcctaccctgtctggtcatgaccccattaggtatggagagctgggaggcaatggggtgggaggagtacccccaagtcctctcactcctccagcmtggaatgtgaagtgactc

SEQ ID NO: 147 - DNA, 13870 bp, Homo sapiens
attcccaccgggasctgcggggctgagtgcccttctcggttgctgccgctgaggagcccgcccagccagccagggccgcgaggccgaggccaggccgcagcccaggagccgccccaccgcagctggcgatggacccgccgaggcccgcgctgctggcgctgctggcgctgcctgcgctgctgctgctgctgctggcgggcgccagggccgaagaggaaatgctggaaaatgtcagcctggtctgtccaaaagatgcgacccgattcaagcacctccggaagtacacatacaactatgaggctgagagttccagtggagtccctgggactgctgattcaagaagtgccaccaggatcaactgcaaggttgagctggaggttccccagctctgcagcttcatcctgaagaccagccagtgcaycctgaaagaggtgtatggcttcaaccctgagggcaaagccttgctgaagaaaaccaagaactctgaggagtttgctgcagccatgtccaggtatgagctcaagctggccattccagaagggaagcaggttttcctttacycggagaaagatgaacctacttacatcctgaacatcaagaggggcatcatttctgccctcctggttcccccagagacagaagaagccaagcaagtgttgtttctggataccgtgtatggaaactgctccactcactttaccgtcaagacgaggaagggcaatgtggcaacagawatatccactgaaagagacctggggcagtgtgatcgcttcaagcccatccgcacaggcatcagcccacttgctctcatcaaaggcatgacccgccccttgtcaactctgatcagcagcagccagtcctgtcagtacacactggacrctaagaggaagcatgtggcagaagccatctgcaaggagcaacacctcttcctgcctttctcctacaagaataagtatgggatggtagcacaagtgacacagactttgaaacttgaagacacaccaaagatcaacagccgcttctttggtgaaggtamtaagaagatgggcctcgcatttgagagcaccaaatccacatcacctccaaagcaggccgaagctgttttgaagactctccaggaactgaaaaaactaaccatctctgagcaaaatatccagagagctaatctcttcaataagctggttactgagctgagaggcctcagtgatgaagcagtcacatctctcttgccacagctgattgaggtgtccagccccatcactttacaagccttggttcagtgtggacagcctcagtgctccactcacatcctccagtggctgaaacgtgtgcatgccaacmcccttctgatagatgtggtcacctacctggtggccctgatccccgagccctcagcacagcagctgcgagagatcttcaacatggcgagggatcagcgcagccragccaccttgtatgcgctgagccacgcggtcaacaactatcataagacaaaccctacagggacccaggagctgctggacattgctaattacctgatggaacagattcaagatgactgcactggggatgaagattacacctatttgattctgcgggtcattggaaatatgggccaaaccatggagcagttaactccagaactcaagtcttcaatcctsaaatgtgtccaaagtacaaagccatcactgatgatccagaaagctgccatccaggctctgcggaaaatggagcctaaagacaaggaccaggaggttcttcttcagactttccttgatgatgcttctcygggagataagcgactggctgcctatcttatgttgatgaggagtccttcacaggcagatattaacaaaattgtccaaattctaccatgggaacagaatgagcaagtgaagaactttgtggcttcccatattgccaatatcttgaactcagaagaattggatatccaagatctgaaaaagttagtgaaagaagytctgaaagaatctcaacttccaactgtcatggacttcagaaaattctctcggaactatcaactctacaaatctgtttctcttccatcacttgacccagcctcagccaaaatagaagggaatcttatatttgatccaaataactaccttcctaaagaaagcatgctgaaaactaccctcactgcctttggatttgcttcagctgacctcatcgagattggcttggaaggaaaaggctttgagccaacattggaagctctttttgggaagcaaggatttttcccagacagtgtcaacaaagctttgtactgggttaatggtcaagttcctgatggtrtctctaagrtcttagtggaccactttggctatamcaaagatgataaacatgagcaggatatggtaaatggaataatgctcagtgttgagaagctgattaaagatttgaaatccaaagaagtcccggaagccagagcctacctccgcatcttgggagaggagcttggttttgccagtctccatgacctccagctcctgggaaagctgcttctgatgggtgcccgcactctgcaggggatcccccagatgattggagaggtcatcaggaagggctcaaagaatgacttttttcttcactacatcttcatggagaatgcctttgaactccccactggagctggattacagttgcaaatatcttcatctggagtcattgctcccggagccaaggctggagtaaaactggaagtagccaacatgcaggctgaactggtggcaaaaccctccgtgtctgtggagtttgtgacaaatatgggcatcatcattccggacttcgctaggagtggggtccagatgaayaccaacytcttccacgagtcgggtctggaggctcatgttgccctaaaagctgggaagctgaagtttatcattccttccccaaagagaccagtcaagctgctcagtggagggtatttttgttcttcaccagcaacacattacatttggtctctaccaccaaaacggaggtgatcccacctctcattgagaacaggcagtcctggtcagtttgcaagcaagtctttcctggcctgaattactgcacctcaggcgcttactccaacgccagctccacagactccgcctcctactatccgctgaccggggacaccagattagagctggaactgaggcctacaggagagattgagcagtattctgtcagcgcaacctatgagctccagagagaggacagagccttggtggataccctgaagtttgtaactcaagcagaaggtgygaagcagactgaggctaccatgacattcaaatataatcggcagagtatgaccttgtccagtgaagtccaaattccggattttgatgttgacctcggaacaatcctcagagttaatgatgaatctactgagggcaaaacgtcttacagactcaccctggacattcagaacaagaaaattactgaggtcgccctcatgggccacctaagttgtgacacaaaggaagaaagaaaaatcaagggtgttatttccataccccgtttgcaagcagaagccagaagtgagatcctcgcccactggtcgcctgccaaactgcttctccaaatggactcatctgctacagcttatggctccacagtttccaagagggtggcatggcattatgatgaagagaagattgaatttgaatggaacacaggcaccaatgtagataccaaaaaaatgacttccaatttccctgtggatctctccgattatcctaagagcttgcatatgtatgctaatagactcmtggatcacagagtccctsaaacagacatgactttccggcacgtgggttccaaattaatagttgcaatgagctcatggcttcagaaggcatctgggagtcttccttrtacccagactttgcaagaccacctcaatagcctgaaggagttcaacctccagaacatgggattgccagacttccacatcccagaaaacctcttcttaaaaagcgatggccgggtcaaatataccttgaacaagaacagtttgaaaattgagattcctttgccttttggtggcaaatcctccagagatctaaagatgttagagactgttaggacaccagccctccacttcaagtctgtgggattccatctgccatctygagagttccaagtccctacttttaccattcccaagttgtatcaactgcaagtgcctctcctgggtgttctagacctctccacgaatgtctacagcaacttgtacaactggtccgcctcctacagtggtggcaacaccagcacagaccatttcagccttcgggctcgttaccacatgaaggctgactctgtggttgacctgctttcctacaatgtgcaaggatctggagaaacaacatatgaccacaagaatacgttcacactatcatrtgatgggtctctacgccacaaatttctagattcgaatatcaaattsagtcatgtagaaaaacttggaaacaacccagtctcaaaagktttactaatattygatgcatctagttcctggggaccacagatgtctgcttcagttcatttggactccaaaaagaaayagcatttgtttgtcaaagaagtcaagattgatgggcagttcagagtctcttcgttctatgctaaaggcacatatggcctgtcttgtcagagggatcctaacactggccggctcaatggagagtccaacctgaggtttaactcctcctacctccaaggcaccaaccagataacaggaagatawgaagatggaaccctctccctcacctccacctctgatctgcaaagtggcatcattaaaaatactgcttccctaaagtatgagaactacgagctgactttaaaatctgacaccaatgggaagtataagaactttgccacttctaacaagatggatatgaccttctctaagcaaaatgcactgctgcgttctgaatatcaggctgattacgagtcattgaggttcttcascctgctttctggatcactaaattcccatggtcttgagttaaatgctgacatcttaggcactgacaaaattaatagtggtgctcacaaggcgacactaaggattggccaagatggaatatctaccagtgcaacgaccaacttgaagtgtagtctcctggtgctggagaatgagctgaatgcagagcttggcctctctggggcatctatgaaattaacaacaaatggccgcttcagggaacacaatgcaaaattcagtctggatgggaaagccgccctcacagagctatcactgggaagtgcttatcaggccatgattctgggtgtcgacagcaaaaacattttcaacttcaaggtcagtcaagaaggacttaagctctcaaatgacatgatgggctcatatgctgaaatgaaatttgaccacacaaacagtctgaacattgcaggcttatcactggacttctcttcaaaacttgacaacatttacagctctgacaagttttataagcaaactgttaatttacagctacagccctattctctggtaactactttaaacagtgacctgaaatacaatgctctggatctcaccaacaatgggaaactacggctagaacccctgaagctgcatgtggctggtaacctaaaaggagcctaccaaaataatgaaataaaacacatctatgccatctcttctgctgccttatcagcaagctataaagcagacactgttgctaaggttcagggtgtggagtttagccatcggctcaacacagacatcgctgggstggcttcagccattgacatgagcacaaactataattcagactcactgcatttcagcaatgtcttccgttctgtaatggccccgtttaccatgaccatcgatgcacatacaaatggcartgggaaactcgctctctggggagaacrtactgggcagctgtatagcaaattcctgttgaaagcagaacctctggcatttactttctctcatgattacaaaggctccacaagtcatcatctcgtgtctaggaaaagcatcagtgcagctcttgaacacaaagtcagtgccctgcttactccagctgagcagacaggcacctggaaactcaagacccaatttaacaacaatgaatacagccaggacttggatgcttacaacactaaagataaaattggcgtggagcttactggaygaactctggctgacctaactctactagactccccaattaaagtgccacttttactcagtgagcccatcaatatcattgatgctttagagatgagagatgccgttgagaagccccaagaatttacaattgttgcttttgtaaagtatgataaaaaccaagatgttcactccattaacctcccattttttgagaccttgcaagaatattttgagaggaatygacaaacmattatagttgtastggaaaacgtacagagaaacctgaagcacatcaatattgatcaatttgtaagaaaatacagagcagccctgggaaaactcccacagcaagctaatgattatctgaattcattcaattgggagagacaagtttcacatgccaaggagaaactgactgctctcacaaaaaagtatagaattacagaaaatgatatacaaattgcattagatgatgccaaaatcaactttaatgaaaaactatctcaactgcagacatatatgatayaatttgatcagtatattaaagatagttatgatttacatgatttgaaaatagctattgctaatattattgatgaaatcattgaaaaattaaaaagtcttgatgagcactatcatatccgtgtaaatttagtaaaaacaatccatgatctacatttgtttattgaaaatattgattttaacaaaagtggaagtagtactgcatcctggattcaaaatgtggatactaagtaccaaatcagaatccagatacaagaaaaactgcagcagcttaagagacacatacagaatatagacatcyagcacctagctggaaagttaaaacaacacattgaggctattgatgttagagtgcttttagatcaattgggaactacaatttcatttgaaagaataaatgayrttcttgagcatgtcaaacactttgttataaatcttattggggattttgaagtagctgagaaaatcaatgccttcagagccaaagtccatgagttaatcgagaggtatgaagtagaccaacaaatccaggttttaatggataaattagtagagttgrcccaccaatacaagttgaaggagactattcagaagctaagcaatgtcctacaacaagttaagataaaagattactttgagaaattggttggatttattgatgatgctgtsaagaagcttaatgaattatcttttaaaacattcattgaagatgttaacaaattccttgacatgttgataaagaaattaaagtcatttgattaccaccagtttgtagatgaaaccaatgacaaaatccgtgaggtgactcagagactcaatggtgaaattcaggctctggaactaccacaaaaagctgaagcattaaaactgtttttagaggaaaccaaggccacagttgcagtgtatctggaaagcctacaggacaccaaaataaccttaatcatcaattggttacaggaggctttaagttcagcatctttggctcacatgaaggccaaattcygagagacyctagaagatacacgagacygaatgtatcaaatggacattcagcaggaacttcaacgatacctgtctctggtaggccaggtttatagcacacttgtcacctacatttctgattggtggactcttgctgctaagaaccttactgactttgcaragcaatattctatccaagattgggctaaacgtatgaaagcattggtagagcaagggttcactgttcctgaaatcaagaccatccttgggaccatgcctgcctttgaagtcagtcttcaggctcttcagaaagctaccttccagacacctgattttatagtccccctaacagatttgaggattccatcagttcagataaacttcaaagacttaaaaaatataaaaatcccatccaggttttccacaccagaatttaccatccttaacaccttccacattccttcctttacaattgactttgtmgaaatgaaagtaaagatcatcagaaccattgaccagatgcwgaacagtgagctgcagtggcccgttccagatatatatctcagggatctgaaggtggaggacattcctctagcgagaatcaccctgccagacttccgtttaccagaaatygcaattccagaattcataatcccaactctcaaccttaatgattttcaagttcctgaccttcacatacyagaattccagcttccccacatctcacacacaattgaagtacctacttttggcaagctatacagtattctgaaaatccaatctcctcttttcacattagatgcaaatgctgacatagggaatggaaccacctcagcamacgaagcaggtatcgcagcttccatcactgccaaaggagagtccaaattagaagttctcaattttgattttcaagcaaatgcacaactctcaaaccctaagattaatccgctggctctgaaggagtcagtgaagttctccagcaagtacctgagaacggagcatgggagtgaaatgctgttttttggaaatgctattgagggaaaatcaaacacagtggcaagtttacacacagaaaaaaatacactggagcttagtaatggagtgattgtcaagataaacaatcagcttaccctggatagcaacactaaatacttccacaaattgaacatccccaaactggacttctctagtcaggctgacctgcgcaacgagatcaagacactgttgaaagctggccacatagcatggacttcttctggaaaagggtcatggaaatgggcctgccccagattctcagatgagggaacacatgaatcacaaattagtttcaccatagaaggacccctcacttcctttggactgtccaataagatcaatagcaaacacctaagagtaaaccaaaacttggtttatgaatctggctccctcaacttttctaaacttgaaattcaatcacaagtcgattcccagcatgtgggccacagtgttytaactgctaaaggcatggcactgtttggagaagggaaggcagagtttactgggaggcatgatgctcatttaaatggaaaggttattggaactttgaaaaattctcttttcttttcagcccagccatttgagatcasggcatccacaaacaatgaagggaatttgaaagttcgttttccattaaggttaacagggaagatagacttcctgaataactatgcactgtttctgagtcccagtgcccagcaagcaagttggcaagtaagtgctaggttcaatcagtataagtacaaccaaaatttctctgctggaaacaacgagaacattatggaggcccatgtaggaataaatggagaarcaaatctggatttcttaaacattcctttaacaattcctgaaatgcgtctaccttacacaataatcacaactcctccactgaaagatttctctctatgggaaaaaacaggcttgaaggaattcttgaaaacgacaaagcaatcatttgatttaagtgtaaaagctcagtataagaaaaacaaacacaggcattccatcacaaatcctttggctgtgctttgtgagtttatcagtcagagcatcaaatcctttgacaggcattttgaaaaaaacagaaacaatgcattagattttgtcaccaaatcctataatgaaacaaaaattaagtttgataagtacaaagctgaaaaatctcacgacgagctccccaggacctttcaaattcctggatacactgttccagttgtcaatgttgaagtgtctccattcaccatagagatgtcggcattcggctatgtgttcccaaaagcagtcrgcatgcctagtttctccatcctaggttctgacgtccgtgtgcctycatacacattaatcctgccatcattagagctgccagtccttcatgtccctagaaatctcaagctttctcttccasatttcaaggaattgtgtaccataagccatatttttattcctgccatgggcaatattacctatgatttctcctttaaatcaagtgtcatcacactgaataccaatgstgaactttttaaccagtcagatattgttgctcatctcctttcttcatcttcatctgtcattgatgcactrcagtacaaattagagggcaccacaagattgacaagaaaaaggggattgaagttagccacagytctgtctctgagcaacaaatttgtggagggtagtcataacagtactgtgagcttaaccacgaaaaatatggaagtgtcagtggcaamaaccacaaaagccsaaattccaattttgagaatgaatttcaagcaagaacttaatggaaataccaagtcaaaacctactgtctcttcctccatggaatttaagtatgatttcaattcttcaatgctgtactctaccgctaaaggagcagttgaccacaagcttagcttggaaagcctcacctcttacttttccattgagtcatctaccaaaggagatgtcaagggttcggttctttctcsggaatattcaggaactattgctagtgaggccaacayttacttgaattccaagagcacayrgtcttcagtgaagctgcagggcacttccaaaattgatgatmtctggaascttgaagtaaaagaaaattttgctggagaagccacactccaaygcatatattccctctgggagcacagtacraaaaaccacttacagctagagggcctctttttcacyaacggagaacatacaagcaaagccaccctggaactctctccayggcaaatgtcagctcttgttcaggtccatgcaagtcagcccagttccttccatgatttccctgaccttggccaggaagtggccctgaatgctaacactaagaaccagaagatcagatggaaaaatgaagtcyrgattcattctgggtctttccagagccaggtcgagctttccaatgaccaagaaaaggcacaccttgacattgcaggatccttagaaggacacctaaggttcctcaaaaatatcatcctaccagtctakgacaagagcttatgggatttcctaaagctggatgtaaccaccagcattggtaggagacagcatcttcgtgtttcaactgcctttgtgtacaccaaaaaccccaatggctattcattctccatccctgtaaaagttttggctgataaattcattaytcctgggctgaaactaaatgatctaaattcagttcttgtcatgcctacgttccatgtcccayttacagatcttcaggttccatcgtgcaaacttgacttcagagaaatacaaatctataagaagctgagaacttmatcatttgccctcaacctaccaacactccccgaggtaaaattccctgaagttgatgtgttaacaaaatattctcaaccagaagactccttgattcccttttttgagataaccgtgcctgaatctcagttaactgtgtcccagttcaygcttccaaaaagtgtttcagatggcattgctgctttggatctaaatgcagtagccaacaagatcrcagactttgagttgcccaccatcatcgtgcctgagcagaccattgagattccctccattaagttctctgtacctgctggaattgtcattccttcctttcaagcactgactgcacgctttgaggtagactctcccgtgtataatgccacttggagtgccagtttgaaaaacaaagcagrttatgttgaaacagtcctggattccacatgcagctcaaccgtacagttcctagaatatgaactaaatgttttgggaacacacaaaatcgaagatggtacgttagcctctaagrctaaaggaacayttgcacaccgtgacttcagtgcagaatatgaagaagatggcaaatatgaaggacttcaggaatgggaaggaaaagcgcacctcaatatcaaaagcccagcgttcaccgatctccatctgcgctaccagaaagacaagaaaggcatctccacctcagcagcctccccagccgtaggcaccgtgggcatggatatggatgaagatgaygacttttctaaatggaacttctactacagccctcagtcctctccagataaaaaactcaccttaattgggaagaagaggcagcttctggcttgctaacctctctgaaagacaacgtgcccaaggccacaggggtcctttatgattatgtcaacaagtaccactgggaacacacagggctcaccctgagagaagtgtcttcaaagctgagaagaaatctgcagaacaatgctgagtgggtttatcaaggggccattaggcaaattgatgatatcgacrtgaggttccagaaagcagccagtggcaccactgggacctaccaagagtggaaggacaaggcccagaatctgtaccaggaactgttgactcaggaaggccaagccagtttccagggactcaaggataacgtgtttgatggcttggtacgagttactcaaraattccatatgaaagtcaagcatctgattgactcactcattgattttctgaacttccccagattccagtttccggggaaacctgggatatacactagggaggaactttgcactatgttcataagggaggtagggacggtactgtcccaggtatatwcgaaagtccataatggttcagaaatactgttttcctatttccaagacctagtgattacacttcctttcragttaaggaaacataaactaatagatgyaatctcgatgtatasggaactgttgaaagatttgtgctacgtaatcttcaggaccttttacaattcattttccaactaatagaagataacattaaacagctgaaagagatgaaatttacttatcttattaattatatccaagatgagatcaacacaatcttcartgattatatcccatatgtttttaaattgttgaaagaaaacctatgccttaatcttcataagttcaatgaatttattcaaaacgagcttcaggaagcttctcaagagttacagcagatccatcaatacattatggcccttcgtgaagaatattttgatccaagtatagttggctggacagtgaaatattatgaacttgaagaaaagatagtcagtctgatcaagaacctgttagttgctcttaaggacttccattctgaatatattgtcagtgcctctaactttacttcccaactctcaagtcaagttgagcaatttctgcacagaaatattcaggaatatcttagcatccttaccgatccagatggaaaagggaaagagaagattgcagagctttctgccactgctcaggaaataattaaaagccagrccattgcgaygaagaaaataatttctgattaccaccagcagtttagatataaactgcaagatttttcagaccaactctctgattactatgaaaaatttattgctgaatccaaaagattgattgacctgtccattcaaaactaccacacatttctgatatacatcacggagttactgaaaaagctgcaatcaaccacagtcatgaacccctacatgaagcttgctccaggagaacttactatcatcctctaattttttaaaakaaatcttcatttattcttcttttccaattgaactttcacatagcacagaaaaaattcaaactgcctatattgcacatatgaactggacctgcaccaaagctggcaccagggctcggaaggtctctgaac

SEQ ID NO: 148 - DNA, 14245 bp, Homo sapiens
attcccaccgggasctgcggggctgagtgcccttctcggttgctgccgctgaggagcccgcccagccagccagggccgcgaggccgaggccaggccgcagcccaggagccgccccaccgcagctggcgatggacccgccgaggcccgcgctgctggcgctgctggcgctgcctgcgctgctgctgctgctgctggcgggcgccagggccgaagaggaaatgctggaaaatgtcagcctggtctgtccaaaagatgcgacccgattcaagcacctccggaagtacacatacaactatgaggctgagagttccagtggagtccctgggactgctgattcaagaagtgccaccaggatcaactgcaaggttgagctggaggttccccagctctgcagcttcatcctgaagaccagccagtgcaycctgaaagaggtgtatggcttcaaccctgagggcaaagccttgctgaagaaaaccaagaactctgaggagtttgctgcagccatgtccaggtatgagctcaagctggccattccagaagggaagcaggttttcctttacycggagaaagatgaacctacttacatcctgaacatcaagaggggcatcatttctgccctcctggttcccccagagacagaagaagccaagcaagtgttgtttctggataccgtgtatggaaactgctccactcactttaccgtcaagacgaggaagggcaatgtggcaacagawatatccactgaaagagacctggggcagtgtgatcgcttcaagcccatccgcacaggcatcagcccacttgctctcatcaaaggcatgacccgccccttgtcaactctgatcagcagcagccagtcctgtcagtacacactggacrctaagaggaagcatgtggcagaagccatctgcaaggagcaacacctcttcctgcctttctcctacaagaataagtatgggatggtagcacaagtgacacagactttgaaacttgaagacacaccaaagatcaacagccgcttctttggtgaaggtamtaagaagatgggcctcgcatttgagagcaccaaatccacatcacctccaaagcaggccgaagctgttttgaagactctccaggaactgaaaaaactaaccatctctgagcaaaatatccagagagctaatctcttcaataagctggttactgagctgagaggcctcagtgatgaagcagtcacatctctcttgccacagctgattgaggtgtccagccccatcactttacaagccttggttcagtgtggacagcctcagtgctccactcacatcctccagtggctgaaacgtgtgcatgccaacmcccttctgatagatgtggtcacctacctggtggccctgatccccgagccctcagcacagcagctgcgagagatcttcaacatggcgagggatcagcgcagccragccaccttgtatgcgctgagccacgcggtcaacaactatcataagacaaaccctacagggacccaggagctgctggacattgctaattacctgatggaacagattcaagatgactgcactggggatgaagattacacctatttgattctgcgggtcattggaaatatgggccaaaccatggagcagttaactccagaactcaagtcttcaatcctsaaatgtgtccaaagtacaaagccatcactgatgatccagaaagctgccatccaggctctgcggaaaatggagcctaaagacaaggaccaggaggttcttcttcagactttccttgatgatgcttctcygggagataagcgactggctgcctatcttatgttgatgaggagtccttcacaggcagatattaacaaaattgtccaaattctaccatgggaacagaatgagcaagtgaagaactttgtggcttcccatattgccaatatcttgaactcagaagaattggatatccaagatctgaaaaagttagtgaaagaagytctgaaagaatctcaacttccaactgtcatggacttcagaaaattctctcggaactatcaactctacaaatctgtttctcttccatcacttgacccagcctcagccaaaatagaagggaatcttatatttgatccaaataactaccttcctaaagaaagcatgctgaaaactaccctcactgcctttggatttgcttcagctgacctcatcgagattggcttggaaggaaaaggctttgagccaacattggaagctctttttgggaagcaaggatttttcccagacagtgtcaacaaagctttgtactgggttaatggtcaagttcctgatggtrtctctaagrtcttagtggaccactttggctatamcaaagatgataaacatgagcaggatatggtaaatggaataatgctcagtgttgagaagctgattaaagatttgaaatccaaagaagtcccggaagccagagcctacctccgcatcttgggagaggagcttggttttgccagtctccatgacctccagctcctgggaaagctgcttctgatgggtgcccgcactctgcaggggatcccccagatgattggagaggtcatcaggaagggctcaaagaatgacttttttcttcactacatcttcatggagaatgcctttgaactccccactggagctggattacagttgcaaatatcttcatctggagtcattgctcccggagccaaggctggagtaaaactggaagtagccaacatgcaggctgaactggtggcaaaaccctccgtgtctgtggagtttgtgacaaatatgggcatcatcattccggacttcgctaggagtggggtccagatgaayaccaacytcttccacgagtcgggtctggaggctcatgttgccctaaaagctgggaagctgaagtttatcattccttccccaaagagaccagtcaagctgctcagtggaggcaacacattacatttggtctctaccaccaaaacggaggtgatcccacctctcattgagaacaggcagtcctggtcagtttgcaagcaagtctttcctggcctgaattactgcacctcaggcgcttactccaacgccagctccacagactccgcctcctactatccgctgaccggggacaccagattagagctggaactgaggcctacaggagagattgagcagtattctgtcagcgcaacctatgagctccagagagaggacagagccttggtggataccctgaagtttgtaactcaagcagaaggtgygaagcagactgaggctaccatgacattcaaatataatcggcagagtatgaccttgtccagtgaagtccaaattccggattttgatgttgacctcggaacaatcctcagagttaatgatgaatctactgagggcaaaacgtcttacagactcaccctggacattcagaacaagaaaattactgaggtcgccctcatgggccacctaagttgtgacacaaaggaagaaagaaaaatcaagggtgttatttccataccccgtttgcaagcagaagccagaagtgagatcctcgcccactggtcgcctgccaaactgcttctccaaatggactcatctgctacagcttatggctccacagtttccaagagggtggcatggcattatgatgaagagaagattgaatttgaatggaacacaggcaccaatgtagataccaaaaaaatgacttccaatttccctgtggatctctccgattatcctaagagcttgcatatgtatgctaatagactcmtggatcacagagtccctsaaacagacatgactttccggcacgtgggttccaaattaatagttgcaatgagctcatggcttcagaaggcatctgggagtcttccttrtacccagactttgcaagaccacctcaatagcctgaaggagttcaacctccagaacatgggattgccagacttccacatcccagaaaacctcttcttaaaaagcgatggccgggtcaaatataccttgaacaagaacagtttgaaaattgagattcctttgccttttggtggcaaatcctccagagatctaaagatgttagagactgttaggacaccagccctccacttcaagtctgtgggattccatctgccatctygagagttccaagtccctacttttaccattcccaagttgtatcaactgcaagtgcctctcctgggtgttctagacctctccacgaatgtctacagcaacttgtacaactggtccgcctcctacagtggtggcaacaccagcacagaccatttcagccttcgggctcgttaccacatgaaggctgactctgtggttgacctgctttcctacaatgtgcaaggatctggagaaacaacatatgaccacaagaatacgttcacactatcatrtgatgggtctctacgccacaaatttctagattcgaatatcaaattsagtcatgtagaaaaacttggaaacaacccagtctcaaaagktttactaatattygatgcatctagttcctggggaccacagatgtctgcttcagttcatttggactccaaaaagaaayagcatttgtttgtcaaagaagtcaagattgatgggcagttcagagtctcttcgttctatgctaaaggcacatatggcctgtcttgtcagagggatcctaacactggccggctcaatggagagtccaacctgaggtttaactcctcctacctccaaggcaccaaccagataacaggaagatawgaagatggaaccctctccctcacctccacctctgatctgcaaagtggcatcattaaaaatactgcttccctaaagtatgagaactacgagctgactttaaaatctgacaccaatgggaagtataagaactttgccacttctaacaagatggatatgaccttctctaagcaaaatgcactgctgcgttctgaatatcaggctgattacgagtcattgaggttcttcascctgctttctggatcactaaattcccatggtcttgagttaaatgctgacatcttaggcactgacaaaattaatagtggtgctcacaaggcgacactaaggattggccaagatggaatatctaccagtgcaacgaccaacttgaagtgtagtctcctggtgctggagaatgagctgaatgcagagcttggcctctctggggcatctatgaaattaacaacaaatggccgcttcagggaacacaatgcaaaattcagtctggatgggaaagccgccctcacagagctatcactgggaagtgcttatcaggccatgattctgggtgtcgacagcaaaaacattttcaacttcaaggtcagtcaagaaggacttaagctctcaaatgacatgatgggctcatatgctgaaatgaaatttgaccacacaaacagtctgaacattgcaggcttatcactggacttctcttcaaaacttgacaacatttacagctctgacaagttttataagcaaactgttaatttacagctacagccctattctctggtaactactttaaacagtgacctgaaatacaatgctctggatctcaccaacaatgggaaactacggctagaacccctgaagctgcatgtggctggtaacctaaaaggagcctaccaaaataatgaaataaaacacatctatgccatctcttctgctgccttatcagcaagctataaagcagacactgttgctaaggttcagggtgtggagtttagccatcggctcaacacagacatcgctgggstggcttcagccattgacatgagcacaaactataattcagactcactgcatttcagcaatgtcttccgttctgtaatggccccgtttaccatgaccatcgatgcacatacaaatggcartgggaaactcgctctctggggagaacrtactgggcagctgtatagcaaattcctgttgaaagcagaacctctggcatttactttctctcatgattacaaaggctccacaagtcatcatctcgtgtctaggaaaagcatcagtgcagctcttgaacacaaagtcagtgccctgcttactccagctgagcagacaggcacctggaaactcaagacccaatttaacaacaatgaatacagccaggacttggatgcttacaacactaaagataaaattggcgtggagcttactggaygaactctggctgacctaactctactagactccccaattaaagtgccacttttactcagtgagcccatcaatatcattgatgctttagagatgagagatgccgttgagaagccccaagaatttacaattgttgcttttgtaaagtatgataaaaaccaagatgttcactccattaacctcccattttttgagaccttgcaagaatattttgagaggaatygacaaacmattatagttgtastggaaaacgtacagagaaacctgaagcacatcaatattgatcaatttgtaagaaaatacagagcagccctgggaaaactcccacagcaagctaatgattatctgaattcattcaattgggagagacaagtttcacatgccaaggagaaactgactgctctcacaaaaaagtatagaattacagaaaatgatatacaaattgcattagatgatgccaaaatcaactttaatgaaaaactatctcaactgcagacatatatgatayaatttgatcagtatattaaagatagttatgatttacatgatttgaaaatagctattgctaatattattgatgaaatcattgaaaaattaaaaagtcttgatgagcactatcatatccgtgtaaatttagtaaaaacaatccatgatctacatttgtttattgaaaatattgattttaacaaaagtggaagtagtactgcatcctggattcaaaatgtggatactaagtaccaaatcagaatccagatacaagaaaaactgcagcagcttaagagacacatacagaatatagacatcyagcacctagctggaaagttaaaacaacacattgaggctattgatgttagagtgcttttagatcaattgggaactacaatttcatttgaaagaataaatgayrttcttgagcatgtcaaacactttgttataaatcttattggggattttgaagtagctgagaaaatcaatgccttcagagccaaagtccatgagttaatcgagaggtatgaagtagaccaacaaatccaggttttaatggataaattagtagagttgrcccaccaatacaagttgaaggagactattcagaagctaagcaatgtcctacaacaagttaagataaaagattactttgagaaattggttggatttattgatgatgctgtsaagaagcttaatgaattatcttttaaaacattcattgaagatgttaacaaattccttgacatgttgataaagaaattaaagtcatttgattaccaccagtttgtagatgaaaccaatgacaaaatccgtgaggtgactcagagactcaatggtgaaattcaggctctggaactaccacaaaaagctgaagcattaaaactgtttttagaggaaaccaaggccacagttgcagtgtatctggaaagcctacaggacaccaaaataaccttaatcatcaattggttacaggaggctttaagttcagcatctttggctcacatgaaggccaaattcygagagacyctagaagatacacgagacygaatgtatcaaatggacattcagcaggaacttcaacgatacctgtctctggtaggccaggtttatagcacacttgtcacctacatttctgattggtggactcttgctgctaagaaccttactgactttgcaragcaatattctatccaagattgggctaaacgtatgaaagcattggtagagcaagggttcactgttcctgaaatcaagaccatccttgggaccatgcctgcctttgaagtcagtcttcaggctcttcagaaagctaccttccagacacctgattttatagtccccctaacagatttgaggattccatcagttcagataaacttcaaagacttaaaaaatataaaaatcccatccaggttttccacaccagaatttaccatccttaacaccttccacattccttcctttacaattgactttgtmgaaatgaaagtaaagatcatcagaaccattgaccagatgcwgaacagtgagctgcagtggcccgttccagatatatatctcagggatctgaaggtggaggacattcctctagcgagaatcaccctgccagacttccgtttaccagaaatygcaattccagaattcataatcccaactctcaaccttaatgattttcaagttcctgaccttcacatacyagaattccagcttccccacatctcacacacaattgaagtacctacttttggcaagctatacagtattctgaaaatccaatctcctcttttcacattagatgcaaatgctgacatagggaatggaaccacctcagcamacgaagcaggtatcgcagcttccatcactgccaaaggagagtccaaattagaagttctcaattttgattttcaagcaaatgcacaactctcaaaccctaagattaatccgctggctctgaaggagtcagtgaagttctccagcaagtacctgagaacggagcatgggagtgaaatgctgttttttggaaatgctattgagggaaaatcaaacacagtggcaagtttacacacagaaaaaaatacactggagcttagtaatggagtgattgtcaagataaacaatcagcttaccctggatagcaacactaaatacttccacaaattgaacatccccaaactggacttctctagtcaggctgacctgcgcaacgagatcaagacactgttgaaagctggccacatagcatggacttcttctggaaaagggtcatggaaatgggcctgccccagattctcagatgagggaacacatgaatcacaaattagtttcaccatagaaggacccctcacttcctttggactgtccaataagatcaatagcaaacacctaagagtaaaccaaaacttggtttatgaatctggctccctcaacttttctaaacttgaaattcaatcacaagtcgattcccagcatgtgggccacagtgttytaactgctaaaggcatggcactgtttggagaagggaaggcagagtttactgggaggcatgatgctcatttaaatggaaaggttattggaactttgaaaaattctcttttcttttcagcccagccatttgagatcasggcatccacaaacaatgaagggaatttgaaagttcgttttccattaaggttaacagggaagatagacttcctgaataactatgcactgtttctgagtcccagtgcccagcaagcaagttggcaagtaagtgctaggttcaatcagtataagtacaaccaaaatttctctgctggaaacaacgagaacattatggaggcccatgtaggaataaatggagaarcaaatctggatttcttaaacattcctttaacaattcctgaaatgcgtctaccttacacaataatcacaactcctccactgaaagatttctctctatgggaaaaaacaggcttgaaggaattcttgaaaacgacaaagcaatcatttgatttaagtgtaaaagctcagtataagaaaaacaaacacaggcattccatcacaaatcctttggctgtgctttgtgagtttatcagtcagagcatcaaatcctttgacaggcattttgaaaaaaacagaaacaatgcattagattttgtcaccaaatcctataatgaaacaaaaattaagtttgataagtacaaagctgaaaaatctcacgacgagctccccaggacctttcaaattcctggatacactgttccagttgtcaatgttgaagtgtctccattcaccatagagatgtcggcattcggctatgtgttcccaaaagcagtcrgcatgcctagtttctccatcctaggttctgacgtccgtgtgcctycatacacattaatcctgccatcattagagctgccagtccttcatgtccctagaaatctcaagctttctcttccasatttcaaggaattgtgtaccataagccatatttttattcctgccatgggcaatattacctatgatttctcctttaaatcaagtgtcatcacactgaataccaatgstgaactttttaaccagtcagatattgttgctcatctcctttcttcatcttcatctgtcattgatgcactrcagtacaaattagagggcaccacaagattgacaagaaaaaggggattgaagttagccacagytctgtctctgagcaacaaatttgtggagggtagtcataacagtactgtgagcttaaccacgaaaaatatggaagtgtcagtggcaamaaccacaaaagccsaaattccaattttgagaatgaatttcaagcaagaacttaatggaaataccaagtcaaaacctactgtctcttcctccatggaatttaagtatgatttcaattcttcaatgctgtactctaccgctaaaggagcagttgaccacaagcttagcttggaaagcctcacctcttacttttccattgagtcatctaccaaaggagatgtcaagggttcggttctttctcsggaatattcaggaactattgctagtgaggccaacayttacttgaattccaagagcacayrgtcttcagtgaagctgcagggcacttccaaaattgatgatmtctggaascttgaagtaaaagaaaattttgctggagaagccacactccaaygcatatattccctctgggagcacagtacraaaaaccacttacagctagagggcctctttttcacyaacggagaacatacaagcaaagccaccctggaactctctccayggcaaatgtcagctcttgttcaggtccatgcaagtcagcccagttccttccatgatttccctgaccttggccaggaagtggccctgaatgctaacactaagaaccagaagatcagatggaaaaatgaagtcyrgattcattctgggtctttccagagccaggtcgagctttccaatgaccaagaaaaggcacaccttgacattgcaggatccttagaaggacacctaaggttcctcaaaaatatcatcctaccagtctakgacaagagcttatgggatttcctaaagctggatgtaaccaccagcattggtaggagacagcatcttcgtgtttcaactgcctttgtgtacaccaaaaaccccaatggctattcattctccatccctgtaaaagttttggctgataaattcattaytcctgggctgaaactaaatgatctaaattcagttcttgtcatgcctacgttccatgtcccayttacagatcttcaggttccatcgtgcaaacttgacttcagagaaatacaaatctataagaagctgagaacttmatcatttgccctcaacctaccaacactccccgaggtaaaattccctgaagttgatgtgttaacaaaatattctcaaccagaagactccttgattcccttttttgagataaccgtgcctgaatctcagttaactgtgtcccagttcaygcttccaaaaagtgtttcagatggcattgctgctttggatctaaatgcagtagccaacaagatcrcagactttgagttgcccaccatcatcgtgcctgagcagaccattgagattccctccattaagttctctgtacctgctggaattgtcattccttcctttcaagcactgactgcacgctttgaggtagactctcccgtgtataatgccacttggagtgccagtttgaaaaacaaagcagrttatgttgaaacagtcctggattccacatgcagctcaaccgtacagttcctagaatatgaactaaatgttttgggaacacacaaaatcgaagatggtacgttagcctctaagrctaaaggaacayttgcacaccgtgacttcagtgcagaatatgaagaagatggcaaatatgaaggacttcaggaatgggaaggaaaagcgcacctcaatatcaaaagcccagcgttcaccgatctccatctgcgctaccagaaagacaagaaaggcatctccacctcagcagcctccccagccgtaggcaccgtgggcatggatatggatgaagatgaygacttttctaaatggaacttctactacagccctcagtcctctccagataaaaaactcaccatattcaaaactgagttgagggtccgggaatctgatgaggaaactcagatcaaagttaattgggaagaagaggcagcttctggcttgctaacctctctgaaagacaacgtgcccaaggccacaggggtcctttatgattatgtcaacaagtaccactgggaacacacagggctcaccctgagagaagtgtcttcaaagctgagaagaaatctgcagaacaatgctgagtgggtttatcaaggggccattaggcaaattgatgatatcgacrtgaggttccagaaagcagccagtggcaccactgggacctaccaagagtggaaggacaaggcccagaatctgtaccaggaactgttgactcaggaaggccaagccagtttccagggactcaaggataacgtgtttgatggcttggtacgagttactcaaraattccatatgaaagtcaagcatctgattgactcactcattgattttctgaacttccccagattccagtttccggggaaacctgggatatacactagggaggaactttgcactatgttcataagggaggtagggacggtactgtcccaggtatatwcgaaagtccataatggttcagaaatactgttttcctatttccaagacctagtgattacacttcctttcragttaaggaaacataaactaatagatgyaatctcgatgtatasggaactgttgaaagatttatcaaaagaagcccaagaggtatttaaagccattcagtctctcaagaccacagaggtgctacgtaatcttcaggaccttttacaattcattttccaactaatagaagataacattaaacagctgaaagagatgaaatttacttatcttattaattatatccaagatgagatcaacacaatcttcartgattatatcccatatgtttttaaattgttgaaagaaaacctatgccttaatcttcataagttcaatgaatttattcaaaacgagcttcaggaagcttctcaagagttacagcagatccatcaatacattatggcccttcgtgaagaatattttgatccaagtatagttggctggacagtgaaatattatgaacttgaagaaaagatagtcagtctgatcaagaacctgttagttgctcttaaggacttccattctgaatatattgtcagtgcctctaactttacttcccaactctcaagtcaagttgagcaatttctgcacagaaatattcaggaatatcttagcatccttaccgatccagatggaaaagggaaagagaagattgcagagctttctgccactgctcaggaaataattaaaagccagrccattgcgaygaagaaaataatttctgattaccaccagcagtttagatataaactgcaagatttttcagaccaactctctgattactatgaaaaatttattgctgaatccaaaagattgattgacctgtccattcaaaactaccacacatttctgatatacatcacggagttactgaaaaagctgcaatcaaccacagtcatgaacccctacatgaagcttgctccaggagaacttactatcatcctctaattttttaaaakaaatcttcatttattcttcttttccaattgaactttcacatagcacagaaaaaattcaaactgcctatattgataaaaccatacagtgagccagccttgcagtaggcagtagactataagcagaagcacatatgaactggacctgcaccaaagctggcaccagggctcggaaggtctctgaactcagaaggatggcattttttgcaagttaaagaaaatcaggatctgagttattttgctaaacttgggggaggaggaacaaataaatggagtctttattgtgtatcataccactgaatgtggctcatttgtattgaaagacagtgaaacgagggcattgataaaatgttctggcacagcaaaacctctagaacacatagtgtgatttaagtaacagaataaaaatggaaacgg

SEQ ID NO: 149 - DNA, 13960 bp, Homo sapiens
attcccaccgggasctgcggggctgagtgcccttctcggttgctgccgctgaggagcccgcccagccagccagggccgcgaggccgaggccaggccgcagcccaggagccgccccaccgcagctggcgatggacccgccgaggcccgcgctgctggcgctgctggcgctgcctgcgctgctgctgctgctgctggcgggcgccagggccgaagaggaaatgctggaaaatgtcagcctggtctgtccaaaagatgcgacccgattcaagcacctccggaagtacacatacaactatgaggctgagagttccagtggagtccctgggactgctgattcaagaagtgccaccaggatcaactgcaaggttgagctggaggttccccagctctgcagcttcatcctgaagaccagccagtgcaycctgaaagaggtgtatggcttcaaccctgagggcaaagccttgctgaagaaaaccaagaactctgaggagtttgctgcagccatgtccaggtatgagctcaagctggccattccagaagggaagcaggttttcctttacycggagaaagatgaacctacttacatcctgaacatcaagaggggcatcatttctgccctcctggttcccccagagacagaagaagccaagcaagtgttgtttctggataccgtgtatggaaactgctccactcactttaccgtcaagacgaggaagggcaatgtggcaacagawatatccactgaaagagacctggggcagtgtgatcgcttcaagcccatccgcacaggcatcagcccacttgctctcatcaaaggcatgacccgccccttgtcaactctgatcagcagcagccagtcctgtcagtacacactggacrctaagaggaagcatgtggcagaagccatctgcaaggagcaacacctcttcctgcctttctcctacaagaataagtatgggatggtagcacaagtgacacagactttgaaacttgaagacacaccaaagatcaacagccgcttctttggtgaaggtamtaagaagatgggcctcgcatttgagagcaccaaatccacatcacctccaaagcaggccgaagctgttttgaagactctccaggaactgaaaaaactaaccatctctgagcaaaatatccagagagctaatctcttcaataagctggttactgagctgagaggcctcagtgatgaagcagtcacatctctcttgccacagctgattgaggtgtccagccccatcactttacaagccttggttcagtgtggacagcctcagtgctccactcacatcctccagtggctgaaacgtgtgcatgccaacmcccttctgatagatgtggtcacctacctggtggccctgatccccgagccctcagcacagcagctgcgagagatcttcaacatggcgagggatcagcgcagccragccaccttgtatgcgctgagccacgcggtcaacaactatcataagacaaaccctacagggacccaggagctgctggacattgctaattacctgatggaacagattcaagatgactgcactggggatgaagattacacctatttgattctgcgggtcattggaaatatgggccaaaccatggagcagttaactccagaactcaagtcttcaatcctsaaatgtgtccaaagtacaaagccatcactgatgatccagaaagctgccatccaggctctgcggaaaatggagcctaaagacaaggaccaggaggttcttcttcagactttccttgatgatgcttctcygggagataagcgactggctgcctatcttatgttgatgaggagtccttcacaggcagatattaacaaaattgtccaaattctaccatgggaacagaatgagcaagtgaagaactttgtggcttcccatattgccaatatcttgaactcagaagaattggatatccaagatctgaaaaagttagtgaaagaagytctgaaagaatctcaacttccaactgtcatggacttcagaaaattctctcggaactatcaactctacaaatctgtttctcttccatcacttgacccagcctcagccaaaatagaagggaatcttatatttgatccaaataactaccttcctaaagaaagcatgctgaaaactaccctcactgcctttggatttgcttcagctgacctcatcgagattggcttggaaggaaaaggctttgagccaacattggaagctctttttgggaagcaaggatttttcccagacagtgtcaacaaagctttgtactgggttaatggtcaagttcctgatggtrtctctaagrtcttagtggaccactttggctatamcaaagatgataaacatgagcaggatatggtaaatggaataatgctcagtgttgagaagctgattaaagatttgaaatccaaagaagtcccggaagccagagcctacctccgcatcttgggagaggagcttggttttgccagtctccatgacctccagctcctgggaaagctgcttctgatgggtgcccgcactctgcaggggatcccccagatgattggagaggtcatcaggaagggctcaaagaatgacttttttcttcactacatcttcatggagaatgcctttgaactccccactggagctggattacagttgcaaatatcttcatctggagtcattgctcccggagccaaggctggagtaaaactggaagtagccaacatgcaggctgaactggtggcaaaaccctccgtgtctgtggagtttgtgacaaatatgggcatcatcattccggacttcgctaggagtggggtccagatgaayaccaacytcttccacgagtcgggtctggaggctcatgttgccctaaaagctgggaagctgaagtttatcattccttccccaaagagaccagtcaagctgctcagtggaggcaacacattacatttggtctctaccaccaaaacggaggtgatcccacctctcattgagaacaggcagtcctggtcagtttgcaagcaagtctttcctggcctgaattactgcacctcaggcgcttactccaacgccagctccacagactccgcctcctactatccgctgaccggggacaccagattagagctggaactgaggcctacaggagagattgagcagtattctgtcagcgcaacctatgagctccagagagaggacagagccttggtggataccctgaagtttgtaactcaagcagaaggtgygaagcagactgaggctaccatgacattcaaatataatcggcagagtatgaccttgtccagtgaagtccaaattccggattttgatgttgacctcggaacaatcctcagagttaatgatgaatctactgagggcaaaacgtcttacagactcaccctggacattcagaacaagaaaattactgaggtcgccctcatgggccacctaagttgtgacacaaaggaagaaagaaaaatcaagggtgttatttccataccccgtttgcaagcagaagccagaagtgagatcctcgcccactggtcgcctgccaaactgcttctccaaatggactcatctgctacagcttatggctccacagtttccaagagggtggcatggcattatgatgaagagaagattgaatttgaatggaacacaggcaccaatgtagataccaaaaaaatgacttccaatttccctgtggatctctccgattatcctaagagcttgcatatgtatgctaatagactcmtggatcacagagtccctsaaacagacatgactttccggcacgtgggttccaaattaatagttgcaatgagctcatggcttcagaaggcatctgggagtcttccttrtacccagactttgcaagaccacctcaatagcctgaaggagttcaacctccagaacatgggattgccagacttccacatcccagaaaacctcttcttaaaaagcgatggccgggtcaaatataccttgaacaagaacagtttgaaaattgagattcctttgccttttggtggcaaatcctccagagatctaaagatgttagagactgttaggacaccagccctccacttcaagtctgtgggattccatctgccatctygagagttccaagtccctacttttaccattcccaagttgtatcaactgcaagtgcctctcctgggtgttctagacctctccacgaatgtctacagcaacttgtacaactggtccgcctcctacagtggtggcaacaccagcacagaccatttcagccttcgggctcgttaccacatgaaggctgactctgtggttgacctgctttcctacaatgtgcaaggatctggagaaacaacatatgaccacaagaatacgttcacactatcatrtgatgggtctctacgccacaaatttctagattcgaatatcaaattsagtcatgtagaaaaacttggaaacaacccagtctcaaaagktttactaatattygatgcatctagttcctggggaccacagatgtctgcttcagttcatttggactccaaaaagaaayagcatttgtttgtcaaagaagtcaagattgatgggcagttcagagtctcttcgttctatgctaaaggcacatatggcctgtcttgtcagagggatcctaacactggccggctcaatggagagtccaacctgaggtttaactcctcctacctccaaggcaccaaccagataacaggaagatawgaagatggaaccctctccctcacctccacctctgatctgcaaagtggcatcattaaaaatactgcttccctaaagtatgagaactacgagctgactttaaaatctgacaccaatgggaagtataagaactttgccacttctaacaagatggatatgaccttctctaagcaaaatgcactgctgcgttctgaatatcaggctgattacgagtcattgaggttcttcascctgctttctggatcactaaattcccatggtcttgagttaaatgctgacatcttaggcactgacaaaattaatagtggtgctcacaaggcgacactaaggattggccaagatggaatatctaccagtgcaacgaccaacttgaagtgtagtctcctggtgctggagaatgagctgaatgcagagcttggcctctctggggcatctatgaaattaacaacaaatggccgcttcagggaacacaatgcaaaattcagtctggatgggaaagccgccctcacagagctatcactgggaagtgcttatcaggccatgattctgggtgtcgacagcaaaaacattttcaacttcaaggtcagtcaagaaggacttaagctctcaaatgacatgatgggctcatatgctgaaatgaaatttgaccacacaaacagtctgaacattgcaggcttatcactggacttctcttcaaaacttgacaacatttacagctctgacaagttttataagcaaactgttaatttacagctacagccctattctctggtaactactttaaacagtgacctgaaatacaatgctctggatctcaccaacaatgggaaactacggctagaacccctgaagctgcatgtggctggtaacctaaaaggagcctaccaaaataatgaaataaaacacatctatgccatctcttctgctgccttatcagcaagctataaagcagacactgttgctaaggttcagggtgtggagtttagccatcggctcaacacagacatcgctgggstggcttcagccattgacatgagcacaaactataattcagactcactgcatttcagcaatgtcttccgttctgtaatggccccgtttaccatgaccatcgatgcacatacaaatggcartgggaaactcgctctctggggagaacrtactgggcagctgtatagcaaattcctgttgaaagcagaacctctggcatttactttctctcatgattacaaaggctccacaagtcatcatctcgtgtctaggaaaagcatcagtgcagctcttgaacacaaagtcagtgccctgcttactccagctgagcagacaggcacctggaaactcaagacccaatttaacaacaatgaatacagccaggacttggatgcttacaacactaaagataaaattggcgtggagcttactggaygaactctggctgacctaactctactagactccccaattaaagtgccacttttactcagtgagcccatcaatatcattgatgctttagagatgagagatgccgttgagaagccccaagaatttacaattgttgcttttgtaaagtatgataaaaaccaagatgttcactccattaacctcccattttttgagaccttgcaagaatattttgagaggaatygacaaacmattatagttgtastggaaaacgtacagagaaacctgaagcacatcaatattgatcaatttgtaagaaaatacagagcagccctgggaaaactcccacagcaagctaatgattatctgaattcattcaattgggagagacaagtttcacatgccaaggagaaactgactgctctcacaaaaaagtatagaattacagaaaatgatatacaaattgcattagatgatgccaaaatcaactttaatgaaaaactatctcaactgcagacatatatgatayaatttgatcagtatattaaagatagttatgatttacatgatttgaaaatagctattgctaatattattgatgaaatcattgaaaaattaaaaagtcttgatgagcactatcatatccgtgtaaatttagtaaaaacaatccatgatctacatttgtttattgaaaatattgattttaacaaaagtggaagtagtactgcatcctggattcaaaatgtggatactaagtaccaaatcagaatccagatacaagaaaaactgcagcagcttaagagacacatacagaatatagacatcyagcacctagctggaaagttaaaacaacacattgaggctattgatgttagagtgcttttagatcaattgggaactacaatttcatttgaaagaataaatgayrttcttgagcatgtcaaacactttgttataaatcttattggggattttgaagtagctgagaaaatcaatgccttcagagccaaagtccatgagttaatcgagaggtatgaagtagaccaacaaatccaggttttaatggataaattagtagagttgrcccaccaatacaagttgaaggagactattcagaagctaagcaatgtcctacaacaagttaagataaaagattactttgagaaattggttggatttattgatgatgctgtsaagaagcttaatgaattatcttttaaaacattcattgaagatgttaacaaattccttgacatgttgataaagaaattaaagtcatttgattaccaccagtttgtagatgaaaccaatgacaaaatccgtgaggtgactcagagactcaatggtgaaattcaggctctggaactaccacaaaaagctgaagcattaaaactgtttttagaggaaaccaaggccacagttgcagtgtatctggaaagcctacaggacaccaaaataaccttaatcatcaattggttacaggaggctttaagttcagcatctttggctcacatgaaggccaaattcygagagacyctagaagatacacgagacygaatgtatcaaatggacattcagcaggaacttcaacgatacctgtctctggtaggccaggtttatagcacacttgtcacctacatttctgattggtggactcttgctgctaagaaccttactgactttgcaragcaatattctatccaagattgggctaaacgtatgaaagcattggtagagcaagggttcactgttcctgaaatcaagaccatccttgggaccatgcctgcctttgaagtcagtcttcaggctcttcagaaagctaccttccagacacctgattttatagtccccctaacagatttgaggattccatcagttcagataaacttcaaagacttaaaaaatataaaaatcccatccaggttttccacaccagaatttaccatccttaacaccttccacattccttcctttacaattgactttgtmgaaatgaaagtaaagatcatcagaaccattgaccagatgcwgaacagtgagctgcagtggcccgttccagatatatatctcagggatctgaaggtggaggacattcctctagcgagaatcaccctgccagacttccgtttaccagaaatygcaattccagaattcataatcccaactctcaaccttaatgattttcaagttcctgaccttcacatacyagaattccagcttccccacatctcacacacaattgaagtacctacttttggcaagctatacagtattctgaaaatccaatctcctcttttcacattagatgcaaatgctgacatagggaatggaaccacctcagcamacgaagcaggtatcgcagcttccatcactgccaaaggagagtccaaattagaagttctcaattttgattttcaagcaaatgcacaactctcaaaccctaagattaatccgctggctctgaaggagtcagtgaagttctccagcaagtacctgagaacggagcatgggagtgaaatgctgttttttggaaatgctattgagggaaaatcaaacacagtggcaagtttacacacagaaaaaaatacactggagcttagtaatggagtgattgtcaagataaacaatcagcttaccctggatagcaacactaaatacttccacaaattgaacatccccaaactggacttctctagtcaggctgacctgcgcaacgagatcaagacactgttgaaagctggccacatagcatggacttcttctggaaaagggtcatggaaatgggcctgccccagattctcagatgagggaacacatgaatcacaaattagtttcaccatagaaggacccctcacttcctttggactgtccaataagatcaatagcaaacacctaagagtaaaccaaaacttggtttatgaatctggctccctcaacttttctaaacttgaaattcaatcacaagtcgattcccagcatgtgggccacagtgttytaactgctaaaggcatggcactgtttggagaagggaaggcagagtttactgggaggcatgatgctcatttaaatggaaaggttattggaactttgaaaaattctcttttcttttcagcccagccatttgagatcasggcatccacaaacaatgaagggaatttgaaagttcgttttccattaaggttaacagggaagatagacttcctgaataactatgcactgtttctgagtcccagtgcccagcaagcaagttggcaagtaagtgctaggttcaatcagtataagtacaaccaaaatttctctgctggaaacaacgagaacattatggaggcccatgtaggaataaatggagaarcaaatctggatttcttaaacattcctttaacaattcctgaaatgcgtctaccttacacaataatcacaactcctccactgaaagatttctctctatgggaaaaaacaggcttgaaggaattcttgaaaacgacaaagcaatcatttgatttaagtgtaaaagctcagtataagaaaaacaaacacaggcattccatcacaaatcctttggctgtgctttgtgagtttatcagtcagagcatcaaatcctttgacaggcattttgaaaaaaacagaaacaatgcattagattttgtcaccaaatcctataatgaaacaaaaattaagtttgataagtacaaagctgaaaaatctcacgacgagctccccaggacctttcaaattcctggatacactgttccagttgtcaatgttgaagtgtctccattcaccatagagatgtcggcattcggctatgtgttcccaaaagcagtcrgcatgcctagtttctccatcctaggttctgacgtccgtgtgcctycatacacattaatcctgccatcattagagctgccagtccttcatgtccctagaaatctcaagctttctcttccasatttcaaggaattgtgtaccataagccatatttttattcctgccatgggcaatattacctatgatttctcctttaaatcaagtgtcatcacactgaataccaatgstgaactttttaaccagtcagatattgttgctcatctcctttcttcatcttcatctgtcattgatgcactrcagtacaaattagagggcaccacaagattgacaagaaaaaggggattgaagttagccacagytctgtctctgagcaacaaatttgtggagggtagtcataacagtactgtgagcttaaccacgaaaaatatggaagtgtcagtggcaamaaccacaaaagccsaaattccaattttgagaatgaatttcaagcaagaacttaatggaaataccaagtcaaaacctactgtctcttcctccatggaatttaagtatgatttcaattcttcaatgctgtactctaccgctaaaggagcagttgaccacaagcttagcttggaaagcctcacctcttacttttccattgagtcatctaccaaaggagatgtcaagggttcggttctttctcsggaatattcaggaactattgctagtgaggccaacayttacttgaattccaagagcacayrgtcttcagtgaagctgcagggcacttccaaaattgatgatmtctggaascttgaagtaaaagaaaattttgctggagaagccacactccaaygcatatattccctctgggagcacagtacraaaaaccacttacagctagagggcctctttttcacyaacggagaacatacaagcaaagccaccctggaactctctccayggcaaatgtcagctcttgttcaggtccatgcaagtcagcccagttccttccatgatttccctgaccttggccaggaagtggccctgaatgctaacactaagaaccagaagatcagatggaaaaatgaagtcyrgattcattctgggtctttccagagccaggtcgagctttccaatgaccaagaaaaggcacaccttgacattgcaggatccttagaaggacacctaaggttcctcaaaaatatcatcctaccagtctakgacaagagcttatgggatttcctaaagctggatgtaaccaccagcattggtaggagacagcatcttcgtgtttcaactgcctttgtgtacaccaaaaaccccaatggctattcattctccatccctgtaaaagttttggctgataaattcattaytcctgggctgaaactaaatgatctaaattcagttcttgtcatgcctacgttccatgtcccayttacagatcttcaggttccatcgtgcaaacttgacttcagagaaatacaaatctataagaagctgagaacttmatcatttgccctcaacctaccaacactccccgaggtaaaattccctgaagttgatgtgttaacaaaatattctcaaccagaagactccttgattcccttttttgagataaccgtgcctgaatctcagttaactgtgtcccagttcaygcttccaaaaagtgtttcagatggcattgctgctttggatctaaatgcagtagccaacaagatcrcagactttgagttgcccaccatcatcgtgcctgagcagaccattgagattccctccattaagttctctgtacctgctggaattgtcattccttcctttcaagcactgactgcacgctttgaggtagactctcccgtgtataatgccacttggagtgccagtttgaaaaacaaagcagrttatgttgaaacagtcctggattccacatgcagctcaaccgtacagttcctagaatatgaactaaatgttttgggaacacacaaaatcgaagatggtacgttagcctctaagrctaaaggaacayttgcacaccgtgacttcagtgcagaatatgaagaagatggcaaatatgaaggacttcaggaatgggaaggaaaagcgcacctcaatatcaaaagcccagcgttcaccgatctccatctgcgctaccagaaagacaagaaaggcatctccacctcagcagcctccccagccgtaggcaccgtgggcatggatatggatgaagatgaygacttttctaaatggaacttctactacagccctcagtcctctccagataaaaaactcaccatattcaaaactgagttgagggtccgggaatctgatgaggaaactcagatcaaagttaattgggaagaagaggcagcttctggcttgctaacctctctgaaagacaacgtgcccaaggccacaggggtcctttatgattatgtcaacaagtaccactgggaacacacagggctcaccctgagagaagtgtcttcaaagctgagaagaaatctgcagaacaatgctgagtgggtttatcaaggggccattaggcaaattgatgatatcgacrtgaggttccagaaagcagccagtggcaccactgggacctaccaagagtggaaggacaaggcccagaatctgtaccaggaactgttgactcaggaaggccaagccagtttccagggactcaaggataacgtgtttgatggcttggtacgagttactcaaraattccatatgaaagtcaagcatctgattgactcactcattgattttctgaacttccccagattccagtttccggggaaacctgggatatacactagggaggaactttgcactatgttcataagggaggtagggacggtactgtcccaggtatatwcgaaagtccataatggttcagaaatactgttttcctatttccaagacctagtgattacacttcctttcragttaaggaaacataaactaatagatgyaatctcgatgtatasggaactgttgaaagatttatcaaaagaagcccaagaggtatttaaagccattcagtctctcaagaccacagaggtgctacgtaatcttcaggaccttttacaattcattttccaactaatagaagataacattaaacagctgaaagagatgaaatttacttatcttattaattatatccaagatgagatcaacacaatcttcartgattatatcccatatgtttttaaattgttgaaagaaaacctatgccttaatcttcataagttcaatgaatttattcaaaacgagcttcaggaagcttctcaagagttacagcagatccatcaatacattatggcccttcgtgaagaatattttgatccaagtatagttggctggacagtgaaatattatgaacttgaagaaaagatagtcagtctgatcaagaacctgttagttgctcttaaggacttccattctgaatatattgtcagtgcctctaactttacttcccaactctcaagtcaagttgagcaatttctgcacagaaatattcaggaatatcttagcatccttaccgatccagatggaaaagggaaagagaagattgcagagctttctgccactgctcaggaaataattaaaagccagrccattgcgaygaagaaaataatttctgattaccaccagcagtttagatataaactgcaagatttttcagaccaactctctgattactatgaaaaatttattgctgaatccaaaagattgattgacctgtccattcaaaactaccacacatttctgatatacatcacggagttactgaaaaagctgcaatcaaccacagtcatgaacccctacatgaagcttgctccaggagaacttactatcatcctctaattttttaaaakaaatcttcatttattcttcttttccaattgaactttcacatagcacagaaaaaattcaaactgcctatattgcacatatgaactggacctgcaccaaagctggcaccagggctcggaaggtctctgaac

SEQ ID NO: 150 - DNA, 3834 bp, Homo sapiens
ctttcccgagtccgtttgaggaagtccccgaggcgcacagagcaagcccacgcgagggcacctctggasgggagcgcctgcaggaccttgtaaagtcaaaaatgtcagaaacttccaggaccgcctttggaggcagaagagcagttccacccaataactctaatgcagcggaagatgacctgcccacagtggagcttcagggcktggtgccccggggcrtcaacctgcaagagtttcttaatgtcacgagcgttcacctgttcaaggagagatgggacactaamaaggtggaccaccacactgacaagtatgaaaacaacaagctgattgtcygcagagggcagtctttctatgtgcagattgacytcagtcgtccatatgaccccagaagggatctcttcagggtggaatacgtcattggtcgctacccacaggagaacaagggaacctacatcccagtgcctatagtctcagagttacaaagtggaaagtggggggccaagattgtcatgagagaggacaggtctgtgcggctgtccatccagtcttcccccaaatgtattgtggggaaattccgcatgtatgttgctgtctggactccctatggcgtacttygaaccagtcgaaacccagaaacagacacgtacattctcttcaatccttggtgtgaagatgatgctgtgtatctggacaatgagaaagaaagagaagagtwtgtcctgaatgacatcggggtaattttttatggagaggtcaatgacatcaagaccagaagctggagctatggtcagtttgaagatggcatcctggacacttgcctgtatgtgatggacagagcacaaatggacctctctggaakagggaatcccatcaaagtcagccgtgtggggtctgcaatggtgaatgccaaagatgacgaaggtgtcctcgttggatcctgggacaatatctrtgcctatggcgtccccccatcggcctggactggaagsgttgacattctattggaataccggagctctgagaatccagtccggtatggccaatgctgggtttttgctggtgtctttaacacatttttacratgccttggaataccmgcaagaattgttaccaattatttctctgcccatgataatgatgccaatttgcaaatggacatcttccyggaagaagatgggaacgtgaattccaaactcaccaaggattcagtgtggaactaccactgctggaatgaagcatggatgacaaggcctgaccttcctgttggatttggaggctggcaagctgtggacagcacccccyaggaaaatagcgatggcatgtatcrgtgtggccccgcctcggttcaagccatcaagcacrgccatgtctgcttccaatttgatgcaccttttgtttttgcagaggtcaacagcgacctcatttacattacagctaagaaagatggcactcatgtggtggaaaatgtggatgccacccacattgggaaattaattgtgaccaaacaaattggaggagayggcatgatggatattactgatacttacaaattccaagaaggtcaagaagaagagagattggccctagaaactgccctgatgtacrgagctaaaaagcccctcaacacagaaggtgtcatgaaatcaaggtccaacgttgacatggactttgaagtggaaaatgctgtgctgggaaaagacttcaagctctccatcaccttccggaavaacagccacaaccgttacaccatcayagcttatctctcagccaacatcaccttctacaccrgggtccygaaggcagarttcaagaaggagacgttcgacrtgacgctggagcccttgtccttcaagaaagaggcggtgcwgatccaagccggcgagtacatgggtcagctgctggaacaagcgtccctgcacttctttgtcacagctcgcatcaatgagaccagggatgttctggccaagcaaaagtccaccgtgctaaccatccctgagatcatcatcaaggtccgtggcactcaggtagttggttctgacatgactgtgacarttsagtttaccaatcctttaaaagaaacccygygaaatgtctgggtacaccyggatggtcctggagtaacaagaccaatgaagaagatgttccgtgaaatccggcccaactccaccgtgcagtgggaagaagtgtgccggccctgggtctctgggcatcggaagctgatagccagcatgagcagtgactccctgagacatgtgtatggcgagctggaygtgcagattcaaagacgaccttccatgtgaatgcacaggaagctgagatgaaccctggcatttggcctcttgtagtcttggctaaggaaattctaacgcaaaaatagctcttgctttgrcttaggtgtgaagacccagacakgactgcagagggcyccagagtggagatcccacatatttcaaaaacatrcttttccaaacccaggctattcggcaaggaagttagtttttaatctctccaccttccaaaragtgctaagcattagctttaattaagctctcatagctcataagagtaacagtcatcatttatcatcacaaatggctacatctccaaatatcagtgggctctcttaccagggagatttgctcaatacctggcctcatttaaaacaagacttcagattccccactcagccttttgggaataatagcacatgatttgggctctagaattccagtcccctttctcrgggtcaggttctaccctccatgtgagaatatttttcccaggactagagcacaacataatttttatttttggcaaagccagaaaaagatctttcattttgcacctgcagccaagcaaatgcctgccaaattttagatttaccwtgttagaagaggtggccccatattaacaaattgcatttgtgggaaacttaaccacctacaaggagataagaaagcaggtgcaacactcaagtctattgaataatgtagttttgtgatgcattttatagaatgtgtcacactgtggcctgatcagcagragccaatatcccttactttaaccctttctgggatgcaatactaggaagtaaagtgaagaatttatctctttagttagtgattatatttcacccatctctcaggaatcatctcctttgcagaatgatgcaggttcaggtcccctttcagagatataataagcccaacaagttgaagaagctggcggatctagtgaccagatatatagaaggactgcagccactgattctctcttgtccttcacatcacccatkttgagacctcagcttggcactcaggtgctgaagggtaatatggactcagscttgcaaatagccagtgctagytctgacccaaccacagaggatgctgacatcatttgtattatgttccaaggctactacagagaaggctgcctgctatgtatttgcaaggctgatttatggtcagaatttccctctgatatgtctagggtgtgatttaggtcagtagactgtgattcttagcaaaaaatgaacagtgataagtatacwgggggcaaaatcagaatggaatgctctggtctatataaccacatttctaagcctttgagactgttcctgagccttcagcactaacctatgagggtgagctggtcccctctatatatacatcatacttaactttaytaagtaatctcacagcatttgccaagtctcccaatatccaattttaaaatgaaatgcattttgctagacagttaaactggcttaacttagtatattattattaattacaatgtaatagaagcttaaaataaagttaaactgattat

SEQ ID NO: 151 - DNA, 2044 bp, Homo sapiens
aagattgcctttgatgtctacacgtcaacagtgaaaggggttccagagaaaaacaaagcctctggtaaaaagggcaagctcatcccaagattgagtatgcacgaagagggagcagaaacaggagatgggtgcctctggaacaaacatgcttatgcaggtcgctacccacaggagaacaagggaacctacatcccagtgcctatagtctcagagttacaaagtggaaagtggggggccaagattgtcatgagagaggacaggtctgtgcggctgtccatccagtcttcccccaaatgtattgtggggaaattccgcatgtatgttgctgtctggactccctatggcgtacttygaaccagtcgaaacccagaaacagacacgtacattctcttcaatccttggtgtgaagggatttctgacttcatggctgcctctgcctctaggagtcctactcacacttgtgctgctgcaagtgagaaacttgaccgtcaccttcaatttcaatgttggcaacaacaacaaaagcagccacacacaacayctgtgaatgcccagaccttaactgcagtttgggatggaggtggtgctcagcttttatataaagggggaagcaagtatgatgctgtgtatctggacaatgagaaagaaagagaagagtwtgtcctgaatgacatcggggtaattttttatggagaggtcaatgacatcaagaccagaagctggagctatggtcagtttgaagatggcatcctggacacttgcctgtatgtgatggacagagcacaaatggacctctctggaakagggaatcccatcaaagtcagccgtgtggggtctgcaatgggctttctcacttacgaagtgggtattgattctttgcaggatcctgtgtgcctggtcatagaggctagaaatcccattcgcaggttgcaaatgccagagcagcggtataggtggcatgtggactctccagaagaaatagcacatagatctcagttcatccccaggatctggcagcaactatgggcagagaatttcccccaaggagatgcagctgcttctgcaaaggctgccgytactgcagataaaggctcgttattcactgtgacacacctacatgtaccacctccatccatatttgctccagtgaatgccaaagatgacgaaggtgtcctcgttggatcctgggacaatatctrtgcctatggcgtccccccatcggcctggactggaagsgttgacattctattggaataccggagctctgagaatccagtccggtatggccaatgctgggtttttgctggtgtctttaacacatttttacratgccttggaataccmgcaagaattgttaccaattatttctctgcccatgataatgatgccaatttgcaaatggacatcttccyggaagaagatgggaacgtgaattccaaactcaccaaggattcagtgtgcaaggatctcaggagctattggcctcatacttacctccctccacaggctctggtcaaacacacccacctcaacctgtcttccccgctcctggttggtttgtggctggggcccctctcctctccaagtcccaatggtccacagtttgtgatgaatcagtttgtccagttaggtctcagtgactcagggtgtcctcttctccatgactcagccaaatcccagcctgccgaaaccagaaatcagccagcagggaggctcagaggaaaagtacaagagggtgtgagaggtgtattctgctcgccacactccagagccaggagtgacaagtttggctctgtctcttgctgtgacccttctcgccttactactgcagaccatcaaggacagactgcttcctggtttgccaccgtaggtcccctgcatgaaggatgtttccttccaagagggagcctcacctcaggggggctacagttttgcacagagcggccccactgttgacgccaacagaggccatggtctgagctccttagctgttcaggagagggmtggggactcaggaacctcagaagggcagagcagggcagag

SEQ ID NO: 152 - DNA, 5703 bp, Homo sapiens
ttttctgtttttcaggatgaatcttcaagtcatgaatgtaaccagcgcacaatccttctctatggagtcggcaaagagcgtgatgaagcaaggcatcagctgaagaagattaccaaagatatcctgaaaattctaaataagaagagcaccacagagacaggggttggggacgaaggacaaaaagccaggaagaacaaacaggagacatttccaacactggagactgtgttcactaaactccagctcctttcatattttgatcaacatcaagtgacatctcagatttctaacaatgtgctagaacaaatcacaagctttgcgtcaggaacatcctatcatctccctttggctcaccacattcagctcatctttgatctcatggagccagcactgaacatcaacggactaattgacttcgcaatacagttactaaatgaactgagtgttgtggaagctgaactgctcctaaaatcctccagcctggcaggaagttatacaacaggactgtgtgtctgcatcgtggctgttctcaggcgctatcacagttgtctaatcttgaatcctgatcagacagcccasgtgtttgaagggttgtgtggtgtggtcaagcatgtcgtaaacccctcagaatgttcttcccctgaaagatgcattttagcctacctctatgatctctatgtgtcatgtagccacctcagaagtaaatttggagacctcttcagtagtgcctgttcaaaagtaaagcaaaccatatataataacgtgatgcctgcaaattcgaacttgcgatgggatccagacttcatgatggattttattgagaatccctcagcccgcagcatcaactactcaatgctgggcaagatcctcagtgacaaygcggccaatcgctacagctttgtctgcaatacactcatgaatgtatgtatgggccatcaggatgctggcaggattaacgacatagccaatttctcctctgagcttacggcttgctgcactgttcttagttcagaatggctgggggttctgaaggctctttgttgttcttcaaatcacgtgtgggggtttaatgatgtactttgcactgtagatgtgagtgacctttcattccatgattcattagctactttcattgctattctgatagcacgacagtgtttttccctggaggacgtcgtgcagcatgtcgcacttccctctcttctagcagcagcttgtggggatgcsgacgccgagcctggggcgagaatgacatgccgactcttgcttcatctcttccgagctccccaggcctgcttcttacctcaagcaacgggcaaacctttccctggaataagatcatcttgtgatagacacctcttagccgctgctcacaacagcattgaagtgggagccgtgtttgctgtcttaaaagcaattatgatgcttggagatgccaaaattggcaataacagtgtcagctctttaaagaatgatgacttcaccatgagaggtttgcratgtgatgggaatgctgatgatatctggactgcctcacaaaatccaaaatcctgtgggaaaagcatttccatagaaactgccaatttaagagaatacgctagatatgtactgaggactatctgtcaacaggaatgggtaggagagcattgcttaaaagaacctgaaagattatgtacagacaaagaacttatattggaccctgtgctttcaaatatgcaagcacagaaattactgcagcttatctgttatcctcatggcattaaagaatgtaccgagggggacaatctgcaaagacagcacattaagcgtattcttcagaatcttgagcagtggacactgaggcaatcctggttagaactccagctaatgatcaaacagtgcttgaaggaccctggctctggttctgtggccgaaatgaacaacttactggacaatattgcaaaggcaacaatagaggtattccagcagtctgcagacctaaataattcttctaattctggcatgagcctcttcaacccaaacagtattggaagtgctgatacaagtagcacgagacagaatggaataaagacattcctaagttcctccgaacgcaggggtgtatggttggtggcccccctcatcgccaggttgccaacttctgtgcaaggaagagtgctgaaagccgctggggaagagctggagaagggacagcacttgggttcttcttccaaaaaggaaagggacagacagaaacagaaaagtatgtctcttttgagtcaacaacccttcctctcactggtacttacctgccttaagggacaagatgaacaaagggaaggcctcctaacatctctccagaatcaagttaaccagattttaagtaactggagagaagaacgataccaagatgacataaaagcgcggcagatgatgcacgaagcattgcaactccgcctaaatttggtaggaggaatgtttgacacggtgcagaggagcacccagtggactacagactgggccctgctactccttcagatcattacttcaggaactgttgacatgcacactaacaatgaattattcacaacagttcttgacatgctgggtgttttaatcaatggaacgttagcctctgacctatcaaatgcatcccctgggggatctgaagagaacaagcgtgcatacatgaatttagtaaagaaactgaaaaaagagctaggagacaagcgatcagaaagtattgacaaagttcgacagttactaccttwgccgaaacagacatgtgatgtcatcacttgtgaacctatgggttccttgattgacacaaaaggaaacaaaattgctggatttgactctatagataaaaaacagggtctccaggtctctacgaagcagaaggtgtccccgtgggacttgtttgagggtcagaagaacccagctcctttgtcctgggcctggtttgggacagtccgagtggaccraagagtgatcaagtacgaggagcagcatcacctcctgctgtatcacacacaccccatgcccaagccccgcagttactacctccagccactgcccctgcctcctgaggaggaagaggaagagcccacatctccagtttctcaggaaccagaaaggaagtccgctgagctgtcagatcagggaaaaaccacaacagatgaagaaaagaaaacaaaaggaaggaagcgcaagacgaaatctagctcaagagttgatgaatatccacagagcaacatataccgagtgcctcctaattactcgcctatctcctcccaaatgatgcaccatccacagtccacsttgtggggttacaacctcgtgggccagccccagcagcccggctttttccttcagaaccaatctcttactccaggtggctccagattggaccctgcaggctcctttgtcccaaccaacaccaaacaagctctgtcaaacatgctacagcggcgctcaggcgccatgatgcagccgccttctcttcatgcaatcacatcrcagcagcagttgatacagatgaagcttctgcagcagcagcagcaacagcgacttctcaggcaagcccagactcggcctttccaacagggccagccgggggaccaggctgctctctttgctgcgcaagcacggccctcccctcagctccctcagtatccagggctgcagcaagcacagaccatgccacagggctatacaatgtatgggacacagatgcctttgcagcagacatcgcagcagcaggctggcagtgtggtcctgtctcccagctataaytccagagcctatccggccgcacattccaaccccgtgctaatggaaagactcagacagattcagcagcagccgagtggctatgttcagcagcaggcctcgccgtacctgcagcccctgactggctctcagagactgaaccatcaggctctacagcagagccctctggtgggcgggggaattgatgmtgtgctgacttctgcacatccaaaccttccctccgtgcccctgcctcaggatcccakgagacccagacagccrcaagttcgacagcagcagagactyctccagatgcagcagccccagcagccccagccccagcagcctccccagccccagcagtcctcgcagtcccagagtcagacccttggtctccaagcaatgcagccccagcagcccttgtttcccaggcaaggcttgcagcagacccagcagcagcagcagacggccgccttggtgcggcagctccagaagcagctttccagcaaccagccacagcaaggagtgactccgtatgggcatccttcacacttctgaatctgcaagaggagaagacatgacgttttatgtttgcactgaaaaacagaaaatcaaatttaatgcattagtcatcttaaaaatgtccctttttttcatttctttgacattttactatattttatgctacatctcacaaaaaaaaaaaaggtgtttaaacaaaaagccaaggagaagttgtggtttgattttgttgaattcacctttaaagtaggtttacaaatgtgaatcatgcaggcaggcctactcccggaagagtgtgctagcagaccttttgaaattggtgctttttttgaatctcacatttctagaaagaatggattatgatggatctaaggtatttatgtatttcattcattaatgatgacgttgttkttttttttttaattttattttccaaactgtgctggaccaaactactgatttgaaaggcatgtcagatcttgacagaaacatggcctgtttattctgcattcacctgtgatggtgaaacggacatttatttgcatcgctctaatttgaaatgtttgtaatctcataagcactttataaactttgttcttatttatgtaggactcttctttgcttttgttgtggtcaaaaggtgctgaaacagattgttgcttmgtacttaaacttcttaaaccaagaacctaaaccaaggtttctttgagagccgccctaagatgtgcggaaacctgttagaagtagctgtactcaaatttgttttgaggcaagatcattgatgagagtcattgtgaaggtacaacatgtaaatcctaaaggcctgaaagaactgcagtggaatcgtccaactatttattgccagttttggttctcctgaaccttatgccaccttaaggggaaaaaaaaatccagtagctggcttgagattccagtgctcacacttgacatggtttccagagaatctggccccaaagtccagaaggctctggttttcataaaaggtgtatttgctgtttattttgtatggtaagtatttgctcttttgaatttaattattactgtcagtgtcagtcttggttgtgtattgcatatactgtatttataaattggtgcaaaaagcacaagtaaattatacatcaaatttattataaagaaatagtaactattttaactttgttcaagtatgtggtaatttgctcctattagagtaaaaaagaaaccagtaaattatcagtttgtgtaacttaagagtattctatataatatttttttagatttagatgcataaaattttgaatgtgaaaattgcagggcattttaaaacatatgtgggggatattttcccatgttctctgttatttcattttcttttgccatatgattttacatataatatagtcaagcatactgtgaatagacttgtctata

SEQ ID NO: 153 - DNA, 2869 bp, Homo sapiens
gtctcccggaagcggtagcagggccccggcgggtcggggaggaggtttactcagcttgggccccctccgggccagccgccgagggggcgcggcccaggacggcggctaggccgtagtgcagcctctccggagtcctcaggtttgccaataggattatcctgctgccatcatgtcttggtttgttgatcttgctggaaaggcagaagatcttttaaaccgagttgatcaaggggctgcaacagctctcagtaggaaagacaatgccagcaacatatatagcaaaaatactgactatactgaacttcaccagcaaaatacagatttgatatatcagactggacctaaatctacgtatatttcatcagcagstgataacattcgaaatcaaaaagccaccatcttagctggcactgcaaatgtgaaagtaggatctcggacaccagtagaggcctctcatcctgttgaaaatgcatctgttcctaggccttcatcccattttgtgcgaagaaaaaagtcagaacctgatgatgagctgctgtttgattttcttaatagttcacagaaggagcctaccgggagggtggaaatcagaaaggaaaaaggcaagacacctgtctttcagagctctcagacatcargtgtcagttctgtgaaccccagtgtaaccaccatcaaaaccattgaagaaaattcttttgggagccaaacccacgaagctgccagtaactcagattctagccatgaaggtcaagaggaatcttcaaaggaaaatgtgtcatcaaatgctgcctgccctgaccacaccccaacacctaatgatgatggcaaatcacatgaactgtctaaccttcgactggagaatcagctgctgaggaatgaagttcagtctttaaatcaagaaatggcctcgttactccaaagatccaaagagactcaagaagaattaaacaaagcaagagcaagagttgaaaagtggaatgctgaccattcaaagagtgatcgaatgactcraggactccgagcccaagtagatgacctgactgaagctgtggctgcaaaggattcccagctggctgtactgaaagtgagactccaggaagctgaccagctactgagtactcgcacagaagcattagaagccttacagagtgaaaaatcacgaataatgcaggatcaaagtgaaggtaacagcctgcagaatcaagctctgcagactyttcaggagagactgcatgaagcggatgccactctgaagagagagcaggagagctataaacagatgcagagcgagtttgctgcacgccttartaaagtggaaatggaacgtcagaatttagcagaagcaattacactggccgaaagaaaatactcagatgagaagaagagggttgatgaactgcagcagcaagtcaagctgtataagttgaacttggagtcctctaagcaggaattaattgactacaagcaaaaagctactagaatactgcaatctaaggaaaaattgattaacagcttgaaagaaggctctggttttgaaggcctagatagcagcactgccagtagcatggagctggaagaacttyggcatgagaaagagatgcagagggaggaaatacagaagctgrtgggccagatacatcagctcagatccgaattacaggatatggaggcacagcaagttaatgaagcagaatcagcaagagaacagttacaggatctgcatgaccaaatagctgggcagaaagcatccaaacaagaactagagacagaactggagcgactgaagcaggagttccactatatagaagaagatctttatcgaacaaagaacacattgcaaagcagaattaaagatcgagaygaagaaattcaaaaactcaggaatcagcttaccaataaaactttaagcaatagcagtcagtctgagttagaaaatcgactccatcagctaacagagactctcatccagaaacagaccatgctggagagtctcagcacagaaaagaactccctggtctttcaactggagcgcctcgaacagcagatgaactccgcctctggaagtagtagtaatgggtcttcgattaatatgtctggaattgacaatggtgaaggcactcgtctgcgaaatgttcctgttctttttaatgacacagaaactaatctggcaggaatgtacggaaaagttcgcaaagctgctagttcaattgatcagtttagtattcgcctgggaatttttctccgaagataccccatagcgcgagtttttgtaattatatatatggctttgcttcacctctgggtcatgattgttctgttgacttacacaccagaaatgcaccacgaccaaccatatggcaaatgaaccaagcccagttgttgcagtgattggttgtctttttctagacttgggatctgcaagaaggccaattgcctaaaatttctgagaacagtgcacaagattattttatcactacaagcttttaactttttaagttattgtacaagtattctacctaaatcttccaatttcctttaaatggtaagagtttctaaaacagacaataatttaacaagctcagctctgctttatctgagtttagtggtcctaatatatatgtagagaaagawggtggggttgttcacctctgtacagaccawctgtatgttaggtgacattgattatgggttataatcagggaaactaattgtatttagtgacaaaaataaaaagtttttttttataattcagtctgcttttggattttcatatatttaactttgcaaaaagatttactttgtacatgttacaggcttgattggtgtaaatctttttataaatacataaataaaagaaaaatatgcattt

SEQ ID NO: 154 - DNA, 1372 bp, Homo sapiens
aggtgtcctcccttcctggggactgtggggggtggtcaaaagacctctatgccccacctccttcctccctctgccctgctgtgcctggggcagggggagaacagcccacctcgtgactgggggctggcccagcccgccctatccctgggggagggggcgggacagggggagccctataattggacaagtctgggatccttgagtcctactcagccccagcggaggtgaaggacgtccttccccaggagccgactggccaatcacaggcaggaagatgaaggttctgtgggctgcgttgctggtcacattcctggcaggatgccaggccaaggtggagcaagcggtggagacagagccggagcccragctgcgccagcagaccgagtgrcagagcggccagygctgggaacyggcactgggtcgcttttgggattacctgcgctgggtgcagacactgtctgagcaggtgcaggaggagctgctcagctcccaggtcacccaggaactgagggcgctgatggacgagaccatgaaggagttgaaggcctacaaatcggaactggaggaacaactgaccccggtggcggaggagacgcgggcacggctgtccaaggagctgcaggcggcgcaggcccggctgggcgcggacatggaggacgtgygcggccgcctggtgcagtaccgcggcgaggtgcaggccatgctcgrccagagcaccgaggagctgcgggtghrcctcgcctcccacctgykcaagctgystvagcggctcctccgcgatgccgatgacctgcagaagygcctggcagtgtaccaggccggggcccgcgagggcgccgagcgcggcctcagcgccatccgcgagygcctggggcccctggtggaasagggccgcgtgcgggccgccactgtgggctccctggccggccagccgctacaggagcgggcccaggcctrgggcgagcggctgcgcgcgcggatggaggagatgggcagccggacccgcgacygcctggacgaggtgaaggagcaggtggcggaggtgcgcgccaagctgraggagcaggcccagcagatacgcctgcaggccgaggccttccaggcccgcctcaagagctggttcgagcccctggtggaagacatgcagcgccagtgggccgggctggtggagaaggtgcaggctgccgtgggcaccagcgccgcccctgtgcccagcgacaatcactgaacgccgaagcctgcagccatgcgaccccacgccaccccgtgcctcctgcctccgcgcagcctgcagcgggagaccctgtccccgccccagccgtcctcctggggtggaccctagtttaataaagattcaccaagtttcacgcat

SEQ ID NO: 155 - DNA, 6633 bp, Homo sapiens
ttctccccgccccccagttgttgtcgaagtctgggggttgggactggaccccctgattgcgtaagagcaaaaagcgaaggcgcaatctggacactgggagattcggagcgcagggagtttgagagaaacttttattttgaagagaccaaggttgagggggggcttatttcctgacagctatttacttagagcaaatgattagttttagaaggatggactataacattgaatcaattacaaaacgcggtttttgagcccattactgttggagctacagggagagaaacagaggaggagactgcaagagatcattggaggccgtgggcacgctctttactccatgtgtgggacattcattgcggaataacatcggaggagaagtttcccagagctatggggacttcccatccggcgttcctggtcttaggctgtcttctcacagggctgagcctaatcctctgccagctttcattaccctctatccttccaaatgaaaatgaaaaggttgtgcagctgaattcatccttttctctgagatgctttggggagagtgaagtgagctggcagtaccccatgtctgaagaagagagctcygatgtggaaatcagaaatgaagaaaacaacagcgrcctttttgtgacggtcttggaagtgagcagtgcctcggcggcccacacagggttgtacacttgctattacaaccacactcagacagaagagaatgagcttgaaggcaggcacatttacatctatgtgccagacccagatgtagcctttgtacctctaggaatgacggattatttagtcatcgtggaggatgatgattctgccattataccttgtcgcacaactgatcccgagactcctgtaaccttacacaacagtgagggggtggtacctgcctcctacgacagcagacagggctttaatgggaccttcactgtagggccctatatctgtgaggccaccgtcaaaggaaagaagttccagaccatcccatttaaygtttatgctttaaaagcaacatcagagctggatctagaaatggaagctcttaaaaccgtgtataagtcaggggaaacgattgtggtcacctgtgctgtttttaacaatgaggtggttgaccttcaatggacttaccctggagaagtgaaaggcaaaggcatcacaatgctggaagaaatcaaagtcccatccatcaaattggtgtacactttgacggtccccgaggccacggtgaaagacagtggagattacgaatgtgctgcccgccaggctaccagggaggtcaaagaaatgaagaaagtcactatttctgtccatgagaaaggkttcattgaaatcaaacccaccttcagccagttggaagctgtcaacctgcatgaagtcaaacattttgttgtagaggtgcgggcctacccacctcccaggatatcctggctgaaaaacaatctgactctgattgaaaatctcactgagatcaccactgatgtggaaaagattcaggaaataagstatcgaagcaaattaaagctgatccgtgctaaggaagaagacagtggccattatactattgtagctcaaaatgaagatgctgtgaagagctatacttttgaactgttaactcaagttccttcatccattctggacttggtcgatgatcaccatggctyaactgggggacagacggtgaggtgcacagctgaaggcacgccgcttcctgatattgagtggatgatatgcaaagatattaagaaatgtaataatgaaacttcctggactattttggccaacaatgtctcaaacatcatcacggagatccacycccgagacaggagtaccgtggagggccgtgtgactttcgccaaagtggaggagaccatcgccgtgcgatgcctggctaagaatctccttggagctgagaaccgagagctgaagctggtggctcccaccctgcgttctgaactcacggtggctgctgcagtcctggtgctgttggtgattgtgatcatctcacttattgtcctggttgtcatttggaaacagaaaccgaggtatgaaattcgctggagggtcattgaatcaatcagcccrgatggacatgaatatatttatgtggacccgatgcagctgccttatgactcaagatgggagtttccaagagatggactagtgcttggtcgggtcttggggtctggagcgtttgggaaggtggttgaaggaacagcctatggattaagccggtcccaacctgtcatgaaagttgcagtgaagatgctaaaacccacggccagatccagtgaaaaacaagctctcatgtctgaactgaagataatgactcacctggggccacatttgaacattgtaaacttgctgggagcctgcaccaagtcaggccccatttacatcatcacagagtattgcttctatggagatttggtcaactatttgcataagaatagggatagcttcctgagccaccacccagagaagccaaagaaagagctggatatctttggattgaaccctgctgatgaaagcacacggagctatgttattttatcttttgaaaacaatggtgactacatggacatgaagcaggctgatactacacagtatgtcyccatgctagaaaggaaagaggtttctaaatattccgacatccagagatcactctatgatcgtccagcctcatrtaagaagaaatctatgttagactcagaagtcaaaaacctcctttcagatgataactcagaaggccttactttattggatttgttgagcttcacctatcaagttgcccgaggaatggagtttttggcttcaaaaaattgtgtccaccgtgatctggctgctcgcaacgtyctcctggcacaaggaaaaattgtgaagatctgtgactttggcctggccagagacatcatgcatgattcgaactatgtgtcgaaaggcagtacctttctgcccgtgaagtggatggctcctgagagcatctttgacaacctctacaccacactgagtgatgtctggtcttatggcattctgctctgggagatcttttcccttggtggcaccccttaccccggcatgatggtggattctactttctacaataagatcaagagtgggtaccggatggccaagcctgaccacgctaccagtgaagtctacgagatcatggtgaaatgctggaacagtgagccggagaagagaccctccttttaccacctgagtgagattgtggagaatctgctgcctggacaatataaaaagagttatgaaaaaattcacctggacttcctgaagagtgaccatcctgctgtggcacgcatgcgtgtggactcagacaatgcatacattggtgtcacctacaaaaacgaggaagacaagctgaaggactgggagggtggtctggatgagcagagactgagcgctgacagtggctacatcattcctctgcctgacattgaccctgtccctgaggaggaggacctgggcaagaggaacagacacagctcgcagacctctgaagagagtgccattgagacgggttccagcagttccaccttcatcaagagagaggacgagaccattgaagacatcgacatgatggacgacatcggcatagactcttcagacctggtggaagacagcttcctgtaactggcggattcgaggggttccttccacttctggggccacctctggatcccgttcagaaaaccactttattgcaatgcggaggttgagaggaggacttggttgatgtttaaagagaagttcccagccaagggcctcggggagcgttctaaatatgaatgaatgggatattttgaaatgaactttgtcagtgttgcctcttgcaatgcctcagtagcatctcagtggtgtgtgaagtttggagatagatggataagggaataataggccacagaaggtgaactttgtgcttcaaggacattggtgagagtccaacagacacaatttatactgcgacagaacttcagcattgtaattatgtaaataactctaaccamggctgtgtttagattgtattaactatcttctttggacttctgaagagaccactcaatccatccatgtacttccctcttgaaacctgatgtcagctgctgttgaactttttaaagaagtgcatgaaaaaccatttttgaaccttaaaaggtactggtactatagcattttgctatcttttttagtgttaaagagataaagaataataattaaccaaccttgtttaatagatttgggtcatttagaagcctgacaactcattttcatattgtaatctatgtttataatactactactgttatcagtaatgctaaatgtgtaataatgtaacatgatttccctccagagaaagcacaatttaaaacaatccttactaagtaggtgatgagtttgacagtttttgacatttatattaaataacatgtttctctataaagtatggtaatagctttagtgaatyaaatttagttgagcatagagaacaaagtaaaagtagtgttgtccaggaagtcagaatttttaactgtactgaataggttccccaatccatcgtattaaaaaacaattaactgccctctgaaataatgggattagaaacaaacaaaactcttaagtcctaaaagttctcaatgtagaggcataaacctgtgctgaacataacttctcatgtatattacccaatggaaaatataatgatcagcaaaaagactggatttgcagaagtttttttttttttcttcatgcctgatgaaagctttggcgaccccaatatatgtattttttgaatctatgaacctgaaaagggtcagaaggatgcccagacatcagcctccttctttcaccccttaccccaaagagaaagagtttgaaactcgagaccataaagatattctttagtggaggctggatgtgcattagcctggatcctcagttctcaaatgtgtgtggcagccaggatgactagatcctgggtttccatccttgagattctgaagtatgaagtctgagggaaaccagagtctgtatttttctaaactccctggctgttctgatcggccagttttcggaaacactgacttaggtttcaggaagttgccatgggaaacaaataatttgaactttggaacagggttggmattcaaccacgcaggaagcctactatttaaatccttggcttcaggttagtgacatttaatgccatctagctagcaattgcgaccttaatttaactttccagtcttagctgaggctgagaaagctaaagtttggttttgacaggttttccaaaagtaaagatgctacttcccactgtatgggggagattgaactttccccgtctcccgtcttctgcctcccactccataccccgccaaggaaaggcatgtacaaaaattatgcaattcagtgttccaagtctctgtgtaaccagctcagtgttttggtggaaaaaacattttaagttttactgataatttgaggttagatgggaggatgaattgtcacatctatccacactgtcaaacaggttggtgtgggttcattggcattctttgcaatactgcttaattgctgataccatatgaatgaaacatgggctgtgattactgcaatcactgtgctatcggcagatgatgctttggaagatgcagaagcaataataaagtacttgactacctactggtgtaatctcaatgcaagccccaactttcttatccaactttttcatagtaagtgcgaagactgagccagattggccaattaaaaacgaaaacctgactaggttctgtagagccaattagacttgaaatacgtttgtgtttctagaatcacagctcaagcattctgtttatcgctcactctcccttgtacagccttattttgttggtgctttgcattttgatattgctgtgagccttgcatgacatcatgaggccggatgaaacttctcagtccagcagtttccagtcctaacaaatgctcccacctgaatttgtatatgactgcatttgtgggtgtgtgtgtgttttcagcaaattccagatttgtttccttttggcctcctgcaaagtctccagaagaaaatttgccaatctttcctactttctatttttatgatgacaatcaaagccggcctgagaaacactatttgtgactttttaaacgattagtgatgtccttaaaatgtggtctgccaatctgtacaaaatggtcctatttttgtgaagagggacataagataaaatgatgttatacatcaatatgtatatatgtatttctatatagacttggagaatactgccaaaacatttatgacaagctgtatcactgccttcgtttatatttttttaactgtgataatccccacaggcacattaactgttgcacttttgaatgtccaaaatttatattttagaaataataaaaagaaagatacttacatgttcccaaaacaatggtgtggtgaatgtgtgagaaaaactaacttgatagggtctaccaatacaaaatgtattacgaatgcccctgttcatgtttttgttttaaaacgtgtaaatgaagatctttatatttcaataaatgatatataatttaaagtta

SEQ ID NO: 156 - DNA, 1047 bp, Homo sapiens
ttctccccgccccccagttgttgtcgaagtctgggggttgggactggaccccctgattgcgtaagagcaaaaagcgaaggcgcaatctggacactgggagattcggagcgcagggagtttgagagaaacttttattttgaagagaccaaggttgagggggggcttatttcctgacagctatttacttagagcaaatgattagttttagaaggatggactataacattgaatcaattacaaaacgcggtttttgagcccattactgttggagctacagggagagaaacagaggaggagactgcaagagatcattggaggccgtgggcacgctctttactccatgtgtgggacattcattgcggaataacatcggaggagaagtttcccagagctatggggacttcccatccggcgttcctggtcttaggctgtcttctcacagggctgagcctaatcctctgccagctttcattaccctctatccttccaaatgaaaatgaaaaggttgtgcagctgaattcatccttttctctgagatgctttggggagagtgaagtgagctggcagtaccccatgtctgaagaagagagctcygatgtggaaatcagaaatgaagaaaacaacagcgrcctttttgtgacggtcttggaagtgagcagtgcctcggcggcccacacagggttgtacacttgctattacaaccacactcagacagaagagaatgagcttgaaggcaggcacatttacatctatgtgccagacccagatgtagcctttgtacctctaggaatgacggattatttagtcatcgtggaggatgatgattctgccattataccttgtcgcacaactgatcccgagactcctgtaaccttacacaacagtgagggggtggtacctgcctcctacgacagcagacagggctttaatgggaccttcactgtagggccctatatctgtgaggccaccgtcaaaggaaagaagttccagaccatcccatttaaygtttatgctttaaaaggtacttgtatcatctccttccttctt

SEQ ID NO: 157 - DNA, 343 bp, Homo sapiens
atgcgcgccgtggccctgcgcgmkggctggcagcagcgcaggcgctcggagaagaaaatcaccaggctgccttgatgccaccgtcaaccacgtgtcccttatcctyagctatgccaacagctgcgccaacccyattctctatggcttcctctccgacaacttccgccgatycttccagcgggttctctgcctgcgctgctgcctcctggaaggtgctggaggtgctgaggaggagcccctggactactatgccactgctctcaagagcaaagtgtggcttgtggtagaatgcagtcagttcaggctctgtggccacctgctgagtaaagactggaccctctcc

SEQ ID NO: 158 - DNA, 1498 bp, Homo sapiens
ccgccgcccgagctctctggcgcagcgctagctccgccgcgctcagctgccctgcgccggcacccctggtcatgagcgccccctcgacgctgccccccgggggcgaggaagggctggggacggcctggccctctgcagccaatgccagtagcgctccggcggaggcggaggaggcggtggcggggcccggggacgcgcgggcggcgggcatggtcgctatccagtgcatctacgcgctggtgtgcctggtggggctggtgggcaacgccctggtcatcttcgtgatccttcgctacgccaagatgaagacggctaccamcatctacctgctcaacctggccgtagccgacgagctcttcatgctgagcgtgcccttcgtggcctcgtcggccgccctgcgccactggcccttcggctccgtgctgtgccgcgcggtgctcagcgtcgacggcctcaacatgttcaccagcgtcttctgtctcaccgtgctcagcgtggaccgctacgtggccgtggtgcaccctctgcgcgcggcgacctaccggcggcccagcgtggccaagctcatcaacctgggcgtgtggctggcatccctgttggtcactctccccatcgccatcttcgcagacaccagaccggctcgcggcggccaggccgtggcctgcaacctgcagtggccacacccggcctggtcggcagtcttcgtggtctacactttcctgctgggcttcctgctgcccgtgctggccattggcctgtgctacctgctcatcgtgggcaagatgcgcgccgtggccctgcgcgmkggctggcagcagcgcaggcgctcggagaagaaaatcaccaggctggtgctgatggtcgtggtcgtctttgtgctctgctggatgcctttctacgtggtgcagctgctgaacctcktcgtgaccagccttgatgccaccgtcaaccacgtgtcccttatcctyagctatgccaacagctgcgccaacccyattctctatggcttcctctccgacaacttccgccgatycttccagcgggttctctgcctgcgctgctgcctcctggaaggtgctggaggtgctgaggaggagcccctggactactatgccactgctctcaagagcaaaggtggggcagggtgcatgtgccccccactcccctgccagcaggaagccctgcaaccagaacccggccgcaagcgcatccccctcaccaggaccaccacctttgtctgacaatgcctgccaggatgggcactgatgaatatggttgaacggaactccaaggaccacccaggttgatagtagtgagtttgtgtacagaagactgcaatgaattgaagycatgagacatacagccaggatcctgaaagccaccaacatatgtcacctgcctgggaggcttgcttcgatggtcatcttgttctgcctgctaagaccaggagtcacagctgttgacatcatggtgaataaaaacattttctgccacaggt

SEQ ID NO: 159 - DNA, 1238 bp, Homo sapiens
ccgccgcccgagctctctggcgcagcgctagctccgccgcgctcagctgccctgcgccggcacccctggtcatgagcgccccctcgacgctgccccccgggggcgaggaagggctggggacggcctggccctctgcagccaatgccagtagcgctccggcggaggcggaggaggcggtggcggggcccggggacgcgcgggcggcgggcatggtcgctatccagtgcatctacgcgctggtgtgcctggtggggctggtgggcaacgccctggtcatcttcgtgatccttcgctacgccaagatgaagacggctaccamcatctacctgctcaacctggccgtagccgacgagctcttcatgctgagcgtgcccttcgtggcctcgtcggccgccctgcgccactggcccttcggctccgtgctgtgccgcgcggtgctcagcgtcgacggcctcaacatgttcaccagcgtcttctgtctcaccgtgctcagcgtggaccgctacgtggccgtggtgcaccctctgcgcgcggcgacctaccggcggcccagcgtggccaagctcatcaacctgggcgtgtggctggcatccctgttggtcactctccccatcgccatcttcgcagacaccagaccggctcgcggcggccaggccgtggcctgcaacctgcagtggccacacccggcctggtcggcagtcttcgtggtctacactttcctgctgggcttcctgctgcccgtgctggccattggcctgtgctacctgctcatcgtgggcaagatgcgcgccgtggccctgcgcgmkggctggcagcagcgcaggcgctcggagaagaaaatcaccaggctggtgctgatggtcgtggtcgtctttgtgctctgctggatgcctttctacgtggtgcagctgctgaacctcktcgtgaccagccttgatgccaccgtcaaccacgtgtcccttatcctyagctatgccaacagctgcgccaacccyattctctatggcttcctctccgacaacttccgccgatycttccagcgggttctctgcctgcgctgctgcctcctggaaggtgctggaggtgctgaggaggagcccctggactactatgccactgctctcaagagcaaaggtggggcagggtgcatgtgccccccactcccctgccagcaggaagccctgcaaccagaacccggccgcaagcgcatccccctcaccaggaccaccaccttctga

SEQ ID NO: 160 - DNA, 1060 bp, Homo sapiens
ctagttctcactctgacgtcccgcgtcctttttcatttgtctgcttctcgctcccttccgtgttctgttccctcttcctccctcttccctgggcctgtttctcgctgtccctgtcttttatccttctcatctgcctcttttttgctcaccctgtttctcactgccctcccctccgcctttytcacccctctgtccttttgagctcttttttgctctgtctcttcatttgccttttgcactctcaaamtctttcatcttcccattcgctgtctgtatttctccataactatatctttcttcctctgtctccgcccacccacatttttctctttccctttctctctttggggaccctcccccatgctcccctgccccatccccttttccccttcccrtcttctcatccctccattcccatctttccccagcaattaccagctctggctgggtcrccacaacttgtttgacgacgaaaacacagcccagtttgttcatgtcagtgagagcttcccacaccctggcttcaacatgagcctcctggagaaccacacccgccaagcagacgaggactacagccacgacctcatgctgctccgcctgacagagcctgctgataccatcacagaygctgtgaaggtcgtggagttgcccaccsaggaacccgaagtggggagcacctgtttggcttccggctggggcagcatcgaaccagagaatttctcatttccagatgatctccagtgtgtggacctcaaaatcctgcctaatgatgagtgcraaaaagcccacgtccagaaggwgacagacttcatgctgtgtgtcggacacctggaaggtggcaaagacacctgtgtgggtgattcagggggcccgctgatgtgtgatggtgtgctccaaggtgtcacatcatggggctacgtcccttgtggcacccccaataagccttctgtcgccgtcagagtgctgtcttatgtgaagtggatcgaggacaccatagcggagaactcctgaacgcccagccctgtcccctacccccagtaaaatcaaatgtgcatccaat

SEQ ID NO: 161 - DNA, 874 bp, Homo sapiens
tcctccacctgctggcccctggacacctctgtcaccatgtggttcctggttctgtgcctcgccctgtccctgggggggactggtgctgcgcccccgattcagtcccggattgtgggaggctgggagtgtgagcagcattcccagccctggcaggcggctctgtaccatttcagcactttccagtgtgggggcatcctggtgcaccgccagtgggtgctcacagctgctcattgcatcagcgacaattaccagctctggctgggtcrccacaacttgtttgacgacgaaaacacagcccagtttgttcatgtcagtgagagcttcccacaccctggcttcaacatgagcctcctggagaaccacacccgccaagcagacgaggactacagccacgacctcatgctgctccgcctgacagagcctgctgataccatcacagaygctgtgaaggtcgtggagttgcccaccsaggaacccgaagtggggagcacctgtttggcttccggctggggcagcatcgaaccagagaatttctcatttccagatgatctccagtgtgtggacctcaaaatcctgcctaatgatgagtgcraaaaagcccacgtccagaaggwgacagacttcatgctgtgtgtcggacacctggaaggtggcaaagacacctgtgtgggtgattcagggggcccgctgatgtgtgatggtgtgctccaaggtgtcacatcatggggctacgtcccttgtggcacccccaataagccttctgtcgccgtcagagtgctgtcttatgtgaagtggatcgaggacaccatagcggagaactcctgaacgcccagccctgtcccctacccccagtaaaatcaaatgtgcatccaat

SEQ ID NO: 162 - DNA, 2095 bp, Homo sapiens
gtgagctcgtctctgatctcgcgcaagagtgacacacaggtgttcaaagacgcttctggggagtgagggaagcggtttacgagtgacttggctggagcctcaggggcgggcactggcacggaacacaccctgaggccagccctggctrcccaggcggagctgcctcttctcccgcgggttggtggacccgctcagtacggagttggggragctctttcacttcggaggattgctcaacaaccatgctgggcatctggaccctcctacctctggttcttacgtctgttrctagattatcgtccaaaagtgttaatgcccaagtgrctgacatcaactccaagggattggaattgaggaagactgttactacagttgagactcaraacttggaaggcctgcatcatgatggccaattctgccataarccctgtcctccaggtgaaaggaaagctagggactgmacrgtcaatggggatgaaccagacygcgtgccctgccaagaagggaaggagtacacagacaaagcccatttttcttccaaatgcagaagatgtagattgtgtgatgaaggacatggcttagaagtggaaataaactgcacccggayccagaataccaagtgcagatgtaaaccaaactttttttgtaactctactgtatgtgaacactgtgacccttgcaccaaatgtgaacatggaatcatcaaggaatgcacactcaccagcaacaccaagtgcaaagaggaaggatccagatctaacttggggtggctttgtcttcttcttttgccaattccactaattgtttgggtgaagagaaaggaagtacagaaaacatgcagaaagcacagaaaggaaaaccaaggttctcatgaatctccaamyttaaatcctgtagtggcaataaatttatctgatgttgacttgagtaaatatatcaccactattgctggagtcatgmmactaagtcaagttaaaggctttsttyvaaagaatrrtgtcaatgaagmcaaaakabdtgagatcaagaatgacaatgtccaagacahagcarrayagaaagttyaactgcttcgtaattggcatcaacttcatggaaagaaagaagcgtatgacacattgattaaagatctcaaaaaagccaatctttgtaytcttgcagagaaaaktcagactatcatcctcaaggacattactagtgactcagaaaattcaaacttcagaaatgaaatccaaagcttggtctagagtgaaaaacaacaaattcagttctgagtatatgcaattagtgtttgaaaagattcttaatagctggctgtaaatactgcttggttttttactgggtacattttatcatttattagcgctgaagagccaacatatttgtagatttttaatatctcatgattctgcctccaaggatgtttaaaatctagttgggaaaacaaacttcatcaagagtaaatgcagtggcatgctaagtacccaaataggagtgtatgcagaggatgaaagattaagattatgctctggcatctaacatatgattctgtagtatgaatgtaatcagtgtatgttagtacaaatgtctatccacaggctaaccccactctatgaatcaatagaagaagctatgaccttttgctgaaatatcagttactgaacaggcaggccactttgcctctaaattacctctgataattctagagattttaccatatttctaaactttgtttataactctgagaagatcatatttatgtaaagtatatgtatttgagtgcagaatttaaataaggctctacctcaaagwcctttgcacagtttattggtgtcatattatacaatatttcaattgtgaattcacatagaaaacattaaattataatgtttgactattatatatgtgtatgcattttactggctcaaaactacctacttctttctcaggcatcaaaagcattttgagcaggagagtattactagagctttgccacctctccatttttgccttggtgctcatcttaatggcctaatgcacccccaaacatggaaatatcaccaaaaaatacttaatagtccaccaaaaggcaaga

SEQ ID NO: 163 - DNA, 2584 bp, Homo sapiens
gtgagctcgtctctgatctcgcgcaagagtgacacacaggtgttcaaagacgcttctggggagtgagggaagcggtttacgagtgacttggctggagcctcaggggcgggcactggcacggaacacaccctgaggccagccctggctrcccaggcggagctgcctcttctcccgcgggttggtggacccgctcagtacggagttggggragctctttcacttcggaggattgctcaacaaccatgctgggcatctggaccctcctacctctggttcttacgtctgttrctagattatcgtccaaaagtgttaatgcccaagtgrctgacatcaactccaagggattggaattgaggaagactgttactacagttgagactcaraacttggaaggcctgcatcatgatggccaattctgccataarccctgtcctccaggtgaaaggaaagctagggactgmacrgtcaatggggatgaaccagacygcgtgccctgccaagaagggaaggagtacacagacaaagcccatttttcttccaaatgcagaagatgtagattgtgtgatgaaggacatggcttagaagtggaaataaactgcacccggayccagaataccaagtgcagatgtaaaccaaactttttttgtaactctactgtatgtgaacactgtgacccttgcaccaaatgtgaacatggaatcatcaaggaatgcacactcaccagcaacaccaagtgcaaagaggaaggatccagatctaacttggggtggctttgtcttcttcttttgccaattccactaattgtttgggtgaagagaaaggaagtacagaaaacatgcagaaagcacagaaaggaaaaccaaggttctcatgaatctccaamyttaaatcctgaaacagtggcaataaatttatctgatgttgacttgagtaaatatatcaccactattgctggagtcatgmmactaagtcaagttaaaggctttsttyvaaagaatrrtgtcaatgaagmcaaaakabdtgagatcaagaatgacaatgtccaagacahagcarrayagaaagttyaactgcttcgtaattggcatcaacttcatggaaagaaagaagcgtatgacacattgattaaagatctcaaaaaagccaatctttgtaytcttgcagagaaaaktcagactatcatcctcaaggacattactagtgactcagaaaattcaaacttcagaaatgaaatccaaagcttggtctagagtgaaaaacaacaaattcagttctgagtatatgcaattagtgtttgaaaagattcttaatagctggctgtaaatactgcttggttttttactgggtacattttatcatttattagcgctgaagagccaacatatttgtagatttttaatatctcatgattctgcctccaaggatgtttaaaatctagttgggaaaacaaacttcatcaagagtaaatgcagtggcatgctaagtacccaaataggagtgtatgcagaggatgaaagattaagattatgctctggcatctaacatatgattctgtagtatgaatgtaatcagtgtatgttagtacaaatgtctatccacaggctaaccccactctatgaatcaatagaagaagctatgaccttttgctgaaatatcagttactgaacaggcaggccactttgcctctaaattacctctgataattctagagattttaccatatttctaaactttgtttataactctgagaagatcatatttatgtaaagtatatgtatttgagtgcagaatttaaataaggctctacctcaaagwcctttgcacagtttattggtgtcatattatacaatatttcaattgtgaattcacatagaaaacattaaattataatgtttgactattatatatgtgtatgcattttactggctcaaaactacctacttctttctcaggcatcaaaagcattttgagcaggagagtattactagagctttgccacctctccatttttgccttggtgctcatcttaatggcctaatgcacccccaaacatggaaatatcaccaaaaaatacttaatagtccaccaaaaggcaagactgcccttagaaattctagcctggtttggagatactaactgctctcagagaaagtagctttgtgacatgtcatgaacccatgtttgcaatcaaagatgataaaatagattcttatttttcccccacccccgaaaatgttcaataatgtcccatgtaaaacctgctacaaatggcagcttatacatagcaatggtaaaatcatcatctggatttaggaattgctcttgtcatacccycaagtttctaagatttaagattctccttactactatcctacgtttaaatatctttgaaagtttgtattaaatgtgaattttaagaaataatatttatatttctgtaaatgtaaactgtgaagatagttataaactgaagcagatacctggaaccacctaaagaacttccatttatggaggatttttttgccccttgtgtttggaattataaaatataggtaaaagtacgtaattaaataatgtttttggt

SEQ ID NO: 164 - DNA, 1989 bp, Homo sapiens
gtgagctcgtctctgatctcgcgcaagagtgacacacaggtgttcaaagacgcttctggggagtgagggaagcggtttacgagtgacttggctggagcctcaggggcgggcactggcacggaacacaccctgaggccagccctggctrcccaggcggagctgcctcttctcccgcgggttggtggacccgctcagtacggagttggggragctctttcacttcggaggattgctcaacaaccatgctgggcatctggaccctcctacctctggttcttacgtctgttrctagattatcgtccaaaagtgttaatgcccaagtgrctgacatcaactccaagggattggaattgaggaagactgttactacagttgagactcaraacttggaaggcctgcatcatgatggccaattctgccataarccctgtcctccaggtgaaaggaaagctagggactgmacrgtcaatggggatgaaccagacygcgtgccctgccaagaagggaaggagtacacagacaaagcccatttttcttccaaatgcagaagatgtagattgtgtgatgaaggacatgatgtgaacatggaatcatcaaggaatgcacactcaccagcaacaccaagtgcaaagaggaaggatccagatctaacttggggtggctttgtcttcttcttttgccaattccactaattgtttgggtgaagagaaaggaagtacagaaaacatgcagaaagcacagaaaggaaaaccaaggttctcatgaatctccaamyttaaatcctgaaacagtggcaataaatttatctgatgttgacttgagtaaatatatcaccactattgctggagtcatgmmactaagtcaagttaaaggctttsttyvaaagaatrrtgtcaatgaagmcaaaakabdtgagatcaagaatgacaatgtccaagacahagcarrayagaaagttyaactgcttcgtaattggcatcaacttcatggaaagaaagaagcgtatgacacattgattaaagatctcaaaaaagccaatctttgtaytcttgcagagaaaaktcagactatcatcctcaaggacattactagtgactcagaaaattcaaacttcagaaatgaaatccaaagcttggtctagagtgaaaaacaacaaattcagttctgagtatatgcaattagtgtttgaaaagattcttaatagctggctgtaaatactgcttggttttttactgggtacattttatcatttattagcgctgaagagccaacatatttgtagatttttaatatctcatgattctgcctccaaggatgtttaaaatctagttgggaaaacaaacttcatcaagagtaaatgcagtggcatgctaagtacccaaataggagtgtatgcagaggatgaaagattaagattatgctctggcatctaacatatgattctgtagtatgaatgtaatcagtgtatgttagtacaaatgtctatccacaggctaaccccactctatgaatcaatagaagaagctatgaccttttgctgaaatatcagttactgaacaggcaggccactttgcctctaaattacctctgataattctagagattttaccatatttctaaactttgtttataactctgagaagatcatatttatgtaaagtatatgtatttgagtgcagaatttaaataaggctctacctcaaagwcctttgcacagtttattggtgtcatattatacaatatttcaattgtgaattcacatagaaaacattaaattataatgtttgactattatatatgtgtatgcattttactggctcaaaactacctacttctttctcaggcatcaaaagcattttgagcaggagagtattactagagctttgccacctctccatttttgccttggtgctcatcttaatggcctaatgcacccccaaacatggaaatatcaccaaaaaatacttaatagtccaccaaaaggcaaga

SEQ ID NO: 165 - DNA, 5931 bp, Homo sapiens
gtgagctcgtctctgatctcgcgcaagagtgacacacaggtgttcaaagacgcttctggggagtgagggaagcggtttacgagtgacttggctggagcctcaggggcgggcactggcacggaacacaccctgaggccagccctggctrcccaggcggagctgcctcttctcccgcgggttggtggacccgctcagtacggagttggggragctctttcacttcggaggattgctcaacaaccatgctgggcatctggaccctcctacctctggttcttacgtctgttrctagattatcgtccaaaagtgttaatgcccaagtgrctgacatcaactccaagggattggaattgaggaagactgttactacagttgagactcaraacttggaaggcctgcatcatgatggccaattctgccataarccctgtcctccaggtgaaaggaaagctagggactgmacrgtcaatggggatgaaccagacygcgtgccctgccaagaagggaaggagtacacagacaaagcccatttttcttccaaatgcagaagatgtagattgtgtgatgaaggacatggcttagaagtggaaataaactgcacccggayccagaataccaagtgcagatgtaaaccaaactttttttgtaactctactgtatgtgaacactgtgacccttgcaccaaatgtgaacatggaatcatcaaggaatgcacactcaccagcaacaccaagtgcaaagaggaaggtaattatttttttacggttatattctcctttcccccaaccccatggaaagatgtgaagaaaaaccaatcactcttgattastagaaagtcctttatttaatcttaaagattgcttattttcatataaaatgtccaatgttccaacctacaggatccagatctaacttggggtggctttgtcttcttcttttgccaattccactaattgtttggggtaagttcttgctttgttcaaactgcagattgaaataacttgggaagtagttcacaaagatttgcctcattcttacctataaaaagctaccactttggtagatttatgtattgttaatttcttgcccctgaatgcagccttgagagctgactgataagaacraatgaaattattcctcagctagtttctgagcaacagttttggggcattgagtggtattctcatccttcctatgaacaggtgttctctgcagcagcagaattggccaaaaatcagaagyaattcttcactattcattgagatctccctatgcaaaaagagaacacaagaagcaaaggcattcccaggaaacacattgcagggaacactttaaaaacttgtacttcactgcctcctcttcctcggcctaattgcttgtttttaattatttctccttcttaacttaaaatactatggggacacatgttatacaaaggtgacttagtagagtcagtagaaaagccaaaattagatattatcataattagtctagaaaaatccctttaagtcattcatcaactacagggtcacaccaactttcagtaacttagaagtattcaattttcccttctcagaacaattatctgtttcttcagttcagttgaagaagaaagtttgccttgcctttagcggttgtttagctgaaaatacatttgggatatttaagcactgtaattgtgctcagagacatacagattcttctatctcacattgactttaatgcatacacctattgagtatgtatgcttgagttatttgtgtgtgtatttcatttctgggcatccatagcaagttgatgttgacttgcttgtcctacggcttctgcatcctgccatagtcttgccgtccacatctttgctggacagagagtggtgcttgccatatggtaagtcaaaagccatctccttgctaggccagcctgtggtaattagatgactaattaagatatgtcctttcactagaacacttgacttagtagtacgaaagttccaaaatcagcggtctcctgcgatgtttggccacttttaagtttcactgaatttctcctttttccttcttatatttctcttagtgtgaaagtatgttctcacatgcattctacaaggctgagacctgagttgataaaatttctttgttctttcagtgaagagaaaggaagtacagaaaacatgcagaaagcacagaaaggaaaaccaaggttctcatgaatctccaamyttaaatcctgtaggtattgaaataggtatcagctttccttgaaaagaaaaatagagaaattagtgatttggctttttgttacttccttttacttttttgtttcttgtttgtttcattttgtttgagatggagtcttgctccatagcccaggctggagtgcaggggtgcaatcatggctcactgcagcctcaaagtcctgggctcaagtgatcctcctgcctcaactgtgaccctgggactacaggcatgcaccaccatgccaggttaattttttatttttattttttatagagacagggttcactttgttgcccaggctgrtctcaaacttttgacctcaagcaatccttctgcctcagcctcccaaagttctgggattataggtgtgagccatcacatccggcctgttactttctttatttaaacattgcttgtgtttgtgkgtgcataggttaaaggggcctcacagatgaattatgatatggtacccaaattaaaagtaaacttgtacacaaaaaccgtaagaatcaacaaaggagggaattgagagtgtgctgaaaatgagctgaaaaaagaacttggccaacctccatgttccgtgttgttgttatccctgcagagaaacagcctttaccaggcatgggttcagtatccaagcctgagcaaagagattgctcttaaagtttgtcataagggcacagcttaactttctctggctgccggttgaccttatgtctcaccatatcttttcccaacatggtatcaatatatttcagatagcaagaaatacaccgagaaaagaaaccagttgcacttaatggaattattttcttatttggggccagggctcagtgggagttaggattctttaaattaatatggtaaaaaaaatttcaatttgagccattttctggtattaagaataagaatagttacagggaagaaaattttrgagtagttatatttattatttattttaataagtctatatgaaaaataacctcmacctattttatgaattctttaggtttcttgcctttaaaaactaagacaatattgcttagtttctggcaaggccggaacctttcagaataaaaattgaatggtaaaagtaaccttcttaatcacttaatctagcttcctaattttatacatcaagcaactgattgtacttctttctgaattaaggaaaaattagaagttcacatttagaatattctaaagatatatttttatttgtctttctctgcttccattttttgctttctaggaaacagtggcaataaatttatctggtaaggcttttatcattttatttcatagagatggcatcctttagagtaataggccaatttcagagtaaaataatrttactaatttcagtgacatattatgggatcttgttatttctcatacaattctacctgctcagcataaagcatttatcaggcagtttgtttaaatttataatgartactcatagttaaaaataatcaagtaacaataagacacaatagtctgaggcttaagaaacttttccttcataatcagctagatgtattacagaactcctgcctaaaaagatctagaggttaaagtgtactgtagactcaggtattatcagtgtacccaactctataacaacatacatgattccattcagtkgttctttgatctgtgatttagagataagatgatcataaactctttgcttatacttttagatttgtgggtcattgatcattggatccataagagatgttataggtgatcttttccaatcctcttaatttataaatgagaaaagaagatacagaaatgttatgtattgtggcccaggttatttaacaaattactgggtatatggcaggatttggagttagaactcaaggttgtcttgtttctgtattcccctagtcagctcttcatagacctttaggacttagctataytctgaagtactataaaaagagaaataaacatggttttcactaatgggaatttcatttagaaaaacaaattttcagactattttctatttttcagatgttgacttgagtaaatatatcaccactattgctggagtcatgmmactaagtcaagttaaaggctttsttyvaaagaatrrtgtcaatgaagmcaaaakabdtgagatcaagaatgacaatgtccaagacahagcarrayagaaagttyaactgcttcgtaattggcatcaacttcatggaaagaaagaagcgtatgacacattgattaaagatctcaaaaaagccaatctttgtaytcttgcagagaaaaktcagactatcatcctcaaggacattactagtgactcagaaaattcaaacttcagaaatgaaatccaaagcttggtctagagtgaaaaacaacaaattcagttctgagtatatgcaattagtgtttgaaaagattcttaatagctggctgtaaatactgcttggttttttactgggtacattttatcatttattagcgctgaagagccaacatatttgtagatttttaatatctcatgattctgcctccaaggatgtttaaaatctagttgggaaaacaaacttcatcaagagtaaatgcagtggcatgctaagtacccaaataggagtgtatgcagaggatgaaagattaagattatgctctggcatctaacatatgattctgtagtatgaatgtaatcagtgtatgttagtacaaatgtctatccacaggctaaccccactctatgaatcaatagaagaagctatgaccttttgctgaaatatcagttactgaacaggcaggccactttgcctctaaattacctctgataattctagagattttaccatatttctaaactttgtttataactctgagaagatcatatttatgtaaagtatatgtatttgagtgcagaatttaaataaggctctacctcaaagwcctttgcacagtttattggtgtcatattatacaatatttcaattgtgaattcacatagaaaacattaaattataatgtttgactattatatatgtgtatgcattttactggctcaaaactacctacttctttctcaggcatcaaaagcattttgagcaggagagtattactagagctttgccacctctccatttttgccttggtgctcatcttaatggcctaatgcacccccaaacatggaaatatcaccaaaaaatacttaatagtccaccaaaaggcaagactgcccttagaaattctagcctggtttggagatactaactgctctcagagaaagtagctttgtgacatgtcatgaacccatgtttgcaatcaaagatgataaaatagattcttatttttcccccacccccgaaaatgttcaataatgtcccatgtaaaacctgctacaaatggcagcttatacatagcaatggtaaaatcatcatctggatttaggaattgctcttgtcatacccycaagtttctaagatttaagattctccttactactatcctacgtttaaatatctttgaaagtttgtattaaatgtgaattttaagaaataatatttatatttctgtaaatgtaaactgtgaagatagttataaactgaagcagatacctggaaccacctaaagaacttccatttatggaggatttttttgccccttgtgtttggaattataaaatataggtaaaagtacgtaattaaataatgtttttggt

SEQ ID NO: 166 - DNA, 2337 bp, Homo sapiens
gtgagctcgtctctgatctcgcgcaagagtgacacacaggtgttcaaagacgcttctggggagtgagggaagcggtttacgagtgacttggctggagcctcaggggcgggcactggcacggaacacaccctgaggccagccctggctrcccaggcggagctgcctcttctcccgcgggttggtggacccgctcagtacggagttggggragctctttcacttcggaggattgctcaacaaccatgctgggcatctggaccctcctacctctggttcttacgtctgttrctagattatcgtccaaaagtgttaatgcccaagtgrctgacatcaactccaagggattggaattgaggaagactgttactacagttgagactcaraacttggaaggcctgcatcatgatggccaattctgccataarccctgtcctccagatgtgaacatggaatcatcaaggaatgcacactcaccagcaacaccaagtgcaaagaggaaggatccagatctaacttggggtggctttgtcttcttcttttgccaattccactaattgtttgggtgaagagaaaggaagtacagaaaacatgcagaaagcacagaaaggaaaaccaaggttctcatgaatctccaamyttaaatcctgaaacagtggcaataaatttatctgatgttgacttgagtaaatatatcaccactattgctggagtcatgmmactaagtcaagttaaaggctttsttyvaaagaatrrtgtcaatgaagmcaaaakabdtgagatcaagaatgacaatgtccaagacahagcarrayagaaagttyaactgcttcgtaattggcatcaacttcatggaaagaaagaagcgtatgacacattgattaaagatctcaaaaaagccaatctttgtaytcttgcagagaaaaktcagactatcatcctcaaggacattactagtgactcagaaaattcaaacttcagaaatgaaatccaaagcttggtctagagtgaaaaacaacaaattcagttctgagtatatgcaattagtgtttgaaaagattcttaatagctggctgtaaatactgcttggttttttactgggtacattttatcatttattagcgctgaagagccaacatatttgtagatttttaatatctcatgattctgcctccaaggatgtttaaaatctagttgggaaaacaaacttcatcaagagtaaatgcagtggcatgctaagtacccaaataggagtgtatgcagaggatgaaagattaagattatgctctggcatctaacatatgattctgtagtatgaatgtaatcagtgtatgttagtacaaatgtctatccacaggctaaccccactctatgaatcaatagaagaagctatgaccttttgctgaaatatcagttactgaacaggcaggccactttgcctctaaattacctctgataattctagagattttaccatatttctaaactttgtttataactctgagaagatcatatttatgtaaagtatatgtatttgagtgcagaatttaaataaggctctacctcaaagwcctttgcacagtttattggtgtcatattatacaatatttcaattgtgaattcacatagaaaacattaaattataatgtttgactattatatatgtgtatgcattttactggctcaaaactacctacttctttctcaggcatcaaaagcattttgagcaggagagtattactagagctttgccacctctccatttttgccttggtgctcatcttaatggcctaatgcacccccaaacatggaaatatcaccaaaaaatacttaatagtccaccaaaaggcaagactgcccttagaaattctagcctggtttggagatactaactgctctcagagaaagtagctttgtgacatgtcatgaacccatgtttgcaatcaaagatgataaaatagattcttatttttcccccacccccgaaaatgttcaataatgtcccatgtaaaacctgctacaaatggcagcttatacatagcaatggtaaaatcatcatctggatttaggaattgctcttgtcatacccycaagtttctaagatttaagattctccttactactatcctacgtttaaatatctttgaaagtttgtattaaatgtgaattttaagaaataatatttatatttctgtaaatgtaaactgtgaagatagttataaactgaagcagatacctggaaccacctaaagaacttccatttatggaggatttttttgccccttgtgtttggaattataaaatataggtaaaagtacgtaattaaataatgtttttggt

SEQ ID NO: 167 - DNA, 2032 bp, Homo sapiens
gtgagctcgtctctgatctcgcgcaagagtgacacacaggtgttcaaagacgcttctggggagtgagggaagcggtttacgagtgacttggctggagcctcaggggcgggcactggcacggaacacaccctgaggccagccctggctrcccaggcggagctgcctcttctcccgcgggttggtggacccgctcagtacggagttggggragctctttcacttcggaggattgctcaacaaccatgctgggcatctggaccctcctacctctggttcttacgtctgttrctagattatcgtccaaaagtgttaatgcccaagtgrctgacatcaactccaagggattggaattgaggaagactgttactacagttgagactcaraacttggaaggcctgcatcatgatggccaattctgccataarccctgtcctccaggtgaaaggaaagctagggactgmacrgtcaatggggatgaaccagacygcgtgccctgccaagaagggaaggagtacacagacaaagcccatttttcttccaaatgcagaagatgtagattgtgtgatgaaggacatggcttagaagtggaaataaactgcacccggayccagaataccaagtgcagatgtaaaccaaactttttttgtaactctactgtatgtgaacactgtgacccttgcaccaaatgtgaacatggaatcatcaaggaatgcacactcaccagcaacaccaagtgcaaagaggaagtgaagagaaaggaagtacagaaaacatgcagaaagcacagaaaggaaaaccaaggttctcatgaatctccaamyttaaatcctgtagtggcaataaatttatctgatgttgacttgagtaaatatatcaccactattgctggagtcatgmmactaagtcaagttaaaggctttsttyvaaagaatrrtgtcaatgaagmcaaaakabdtgagatcaagaatgacaatgtccaagacahagcarrayagaaagttyaactgcttcgtaattggcatcaacttcatggaaagaaagaagcgtatgacacattgattaaagatctcaaaaaagccaatctttgtaytcttgcagagaaaaktcagactatcatcctcaaggacattactagtgactcagaaaattcaaacttcagaaatgaaatccaaagcttggtctagagtgaaaaacaacaaattcagttctgagtatatgcaattagtgtttgaaaagattcttaatagctggctgtaaatactgcttggttttttactgggtacattttatcatttattagcgctgaagagccaacatatttgtagatttttaatatctcatgattctgcctccaaggatgtttaaaatctagttgggaaaacaaacttcatcaagagtaaatgcagtggcatgctaagtacccaaataggagtgtatgcagaggatgaaagattaagattatgctctggcatctaacatatgattctgtagtatgaatgtaatcagtgtatgttagtacaaatgtctatccacaggctaaccccactctatgaatcaatagaagaagctatgaccttttgctgaaatatcagttactgaacaggcaggccactttgcctctaaattacctctgataattctagagattttaccatatttctaaactttgtttataactctgagaagatcatatttatgtaaagtatatgtatttgagtgcagaatttaaataaggctctacctcaaagwcctttgcacagtttattggtgtcatattatacaatatttcaattgtgaattcacatagaaaacattaaattataatgtttgactattatatatgtgtatgcattttactggctcaaaactacctacttctttctcaggcatcaaaagcattttgagcaggagagtattactagagctttgccacctctccatttttgccttggtgctcatcttaatggcctaatgcacccccaaacatggaaatatcaccaaaaaatacttaatagtccaccaaaaggcaaga

SEQ ID NO: 168 - DNA, 2475 bp, Homo sapiens
gtgagctcgtctctgatctcgcgcaagagtgacacacaggtgttcaaagacgcttctggggagtgagggaagcggtttacgagtgacttggctggagcctcaggggcgggcactggcacggaacacaccctgaggccagccctggctrcccaggcggagctgcctcttctcccgcgggttggtggacccgctcagtacggagttggggragctctttcacttcggaggattgctcaacaaccatgctgggcatctggaccctcctacctctggttcttacgtctgttrctagattatcgtccaaaagtgttaatgcccaagtgrctgacatcaactccaagggattggaattgaggaagactgttactacagttgagactcaraacttggaaggcctgcatcatgatggccaattctgccataarccctgtcctccaggtgaaaggaaagctagggactgmacrgtcaatggggatgaaccagacygcgtgccctgccaagaagggaaggagtacacagacaaagcccatttttcttccaaatgcagaagatgtagattgtgtgatgaaggacatgatgtgaacatggaatcatcaaggaatgcacactcaccagcaacaccaagtgcaaagaggaaggatccagatctaacttggggtggctttgtcttcttcttttgccaattccactaattgtttgggtgaagagaaaggaagtacagaaaacatgcagaaagcacagaaaggaaaaccaaggttctcatgaatctccaamyttaaatcctgaaacagtggcaataaatttatctgatgttgacttgagtaaatatatcaccactattgctggagtcatgmmactaagtcaagttaaaggctttsttyvaaagaatrrtgtcaatgaagmcaaaakabdtgagatcaagaatgacaatgtccaagacahagcarrayagaaagttyaactgcttcgtaattggcatcaacttcatggaaagaaagaagcgtatgacacattgattaaagatctcaaaaaagccaatctttgtaytcttgcagagaaaaktcagactatcatcctcaaggacattactagtgactcagaaaattcaaacttcagaaatgaaatccaaagcttggtctagagtgaaaaacaacaaattcagttctgagtatatgcaattagtgtttgaaaagattcttaatagctggctgtaaatactgcttggttttttactgggtacattttatcatttattagcgctgaagagccaacatatttgtagatttttaatatctcatgattctgcctccaaggatgtttaaaatctagttgggaaaacaaacttcatcaagagtaaatgcagtggcatgctaagtacccaaataggagtgtatgcagaggatgaaagattaagattatgctctggcatctaacatatgattctgtagtatgaatgtaatcagtgtatgttagtacaaatgtctatccacaggctaaccccactctatgaatcaatagaagaagctatgaccttttgctgaaatatcagttactgaacaggcaggccactttgcctctaaattacctctgataattctagagattttaccatatttctaaactttgtttataactctgagaagatcatatttatgtaaagtatatgtatttgagtgcagaatttaaataaggctctacctcaaagwcctttgcacagtttattggtgtcatattatacaatatttcaattgtgaattcacatagaaaacattaaattataatgtttgactattatatatgtgtatgcattttactggctcaaaactacctacttctttctcaggcatcaaaagcattttgagcaggagagtattactagagctttgccacctctccatttttgccttggtgctcatcttaatggcctaatgcacccccaaacatggaaatatcaccaaaaaatacttaatagtccaccaaaaggcaagactgcccttagaaattctagcctggtttggagatactaactgctctcagagaaagtagctttgtgacatgtcatgaacccatgtttgcaatcaaagatgataaaatagattcttatttttcccccacccccgaaaatgttcaataatgtcccatgtaaaacctgctacaaatggcagcttatacatagcaatggtaaaatcatcatctggatttaggaattgctcttgtcatacccycaagtttctaagatttaagattctccttactactatcctacgtttaaatatctttgaaagtttgtattaaatgtgaattttaagaaataatatttatatttctgtaaatgtaaactgtgaagatagttataaactgaagcagatacctggaaccacctaaagaacttccatttatggaggatttttttgccccttgtgtttggaattataaaatataggtaaaagtacgtaattaaataatgtttttggt

SEQ ID NO: 169 - DNA, 1851 bp, Homo sapiens
gtgagctcgtctctgatctcgcgcaagagtgacacacaggtgttcaaagacgcttctggggagtgagggaagcggtttacgagtgacttggctggagcctcaggggcgggcactggcacggaacacaccctgaggccagccctggctrcccaggcggagctgcctcttctcccgcgggttggtggacccgctcagtacggagttggggragctctttcacttcggaggattgctcaacaaccatgctgggcatctggaccctcctacctctggttcttacgtctgttrctagattatcgtccaaaagtgttaatgcccaagtgrctgacatcaactccaagggattggaattgaggaagactgttactacagttgagactcaraacttggaaggcctgcatcatgatggccaattctgccataarccctgtcctccagatgtgaacatggaatcatcaaggaatgcacactcaccagcaacaccaagtgcaaagaggaaggatccagatctaacttggggtggctttgtcttcttcttttgccaattccactaattgtttgggtgaagagaaaggaagtacagaaaacatgcagaaagcacagaaaggaaaaccaaggttctcatgaatctccaamyttaaatcctgaaacagtggcaataaatttatctgatgttgacttgagtaaatatatcaccactattgctggagtcatgmmactaagtcaagttaaaggctttsttyvaaagaatrrtgtcaatgaagmcaaaakabdtgagatcaagaatgacaatgtccaagacahagcarrayagaaagttyaactgcttcgtaattggcatcaacttcatggaaagaaagaagcgtatgacacattgattaaagatctcaaaaaagccaatctttgtaytcttgcagagaaaaktcagactatcatcctcaaggacattactagtgactcagaaaattcaaacttcagaaatgaaatccaaagcttggtctagagtgaaaaacaacaaattcagttctgagtatatgcaattagtgtttgaaaagattcttaatagctggctgtaaatactgcttggttttttactgggtacattttatcatttattagcgctgaagagccaacatatttgtagatttttaatatctcatgattctgcctccaaggatgtttaaaatctagttgggaaaacaaacttcatcaagagtaaatgcagtggcatgctaagtacccaaataggagtgtatgcagaggatgaaagattaagattatgctctggcatctaacatatgattctgtagtatgaatgtaatcagtgtatgttagtacaaatgtctatccacaggctaaccccactctatgaatcaatagaagaagctatgaccttttgctgaaatatcagttactgaacaggcaggccactttgcctctaaattacctctgataattctagagattttaccatatttctaaactttgtttataactctgagaagatcatatttatgtaaagtatatgtatttgagtgcagaatttaaataaggctctacctcaaagwcctttgcacagtttattggtgtcatattatacaatatttcaattgtgaattcacatagaaaacattaaattataatgtttgactattatatatgtgtatgcattttactggctcaaaactacctacttctttctcaggcatcaaaagcattttgagcaggagagtattactagagctttgccacctctccatttttgccttggtgctcatcttaatggcctaatgcacccccaaacatggaaatatcaccaaaaaatacttaatagtccaccaaaaggcaaga

SEQ ID NO: 170 - DNA, 3186 bp, Homo sapiens
tgtctttttccagggcgcaaccatgtcgccatttcttcggattggcttgtccaactttgactgcgggtcctgccagtcttgtcagggcgaggctgttaacccttactgtgctgtgctcgtcaaagagtatgtcgaatcagagaacgggcagatgtatatccagaaaaagcctaccatgtacccaccctgggacagcacttttgatgcccatatcaacaagggaagrgtcatgcagatcattgtgaaaggcaaaaacgtggacctcatctctgaaaccaccgtggagctctactcgctggctgagaggtgcaggaagaacaacgggaagacagaaatatggttagagctgaaacctcaaggccgaatgctaatgaatgcaagatactttctggaaatgaacacaaaggacatgaatgaatttgagacggaaggcttctttgctttgcatcagcgccggggtgccatcaagcaggcaaaggtccaccacgtcaagtgccacgagttcactgccaccttcttcccacagcccacattttgctctgtctgccacgagtttgtctggggcctgaacaaacagggctaccagtgccgacaatgcaatgcagcaattcacaagaagtgtattgataaagttatagcaaagtgcacaggatcagctatcaatagccgagaaaccatgttccacaaggagagattcaaaattgacatgccacacagatttaaagtctacaattacaagagcccgaccttctgtgaacactgtgggaccctgctgtggggactggcacggcaaggactcaagtgtgatgcatgtggcatgaatgtgcatcatagatgccagacaaaggtggccaacctttgtggcataaaccagaagctaatggctgaagcgctggccatgatwgagagcactcaacaggctcgctgcttaagagatactgaacagatcttcagagaaggtccggttgaaattggtctcccatgctccatcaaaaatgaagcaaggcygccatgtttaccgacaccgggaaaaagagagcctcagggcatttcctgggagtctccgttggatgaggtggataaaatgtgccatcttccagaacctgaactgaacaaagaaagaccatctctgcagattaaactaaaaattgaggattttatcttgcacaaaatgttggggaaaggaagttttggcaaggtcttcctggcagaattcaagaaaaccaatcaatttttcgcaataaaggccttaaagaaagatgtggtcttgatggacgatgatgttgagtgcacgatggtagagaagagagttctttccttggcctgggagcatccgtttctgacrcacatgttttgtacattycagaccaaggaaaacctcttttttgtgatggagtacctcaacggaggggacttaatgtaccacatccaaagctgccacaagttcgacctttccagagcgacgttttatgctgctgaaatcattcttggtctgcagttccttcattccaaaggaatagtctacagggacctgaagctagataacatcctgttagacaaagatggacatatcaagatygcggattttggaatgtgcaaggagaacatgttaggagatgccaagacgaataccttctgtgggacacctgactacatcgccccagagatcttgctgggtcagaaatacaaccactctgtggactggtggtccttyggggttctcctttatgaaatgctgattggtcagtcgcctttccacgggcaggatgaggaggagctcttccactccatccgcatggacaatcccttttacccacggtggctggagaaggaagcaaaggaccttctggtgaagctcttcgtgmgagaacctgagaagaggctgggcgtgaggggagacatccgccagcaccctttgtttcgggagatcaactgggaggaacttgaacggaaggagattgacccaccgttccggccgaaagtgaaatcaccatttgactgcagcaatttcgacaaagaattcttaaacgagaagccccggctgtcatttgccgacagagcactgatcaacagcatggaccagaatatgttcaggaacttttccttcatgaaccccgggatggagcggctgatatcctgaatcttgcccctccagagacaggaaagaatttgccttctccctgggaactggttcaagagacacwgcttgggttcctttttcaacttggaaaaagaaagaaacactcaacaataaakactgagacccgttcgcccccrtgtgacttttatctgtagcagaaaccaagtctacttcactaatgacgatgccgtgtgtctcgtctcctgacatgtctcacagacgctcctgaagttaggtcattactaaccatagttatttacttgaaagatgggtctccgcacttggaaaggtttcaagacttgatactgcaataaattatggctcttcacctgggcgccaactgctgatcaaygaaatgcttgttgaatcaggggcaaacggagtacagacgtctcaagactgaaacggccccrttgcctggtctagtagcggatctcactcagccgcagacaagtaatcactaacccgttttattctattcctatctgtggatgtrtaaatggctggggggccagccctggataggtttttatgggaattctttacaataaacatagcttgtaacttgagatctacaaatccattcatcctgattgggcatgaaatccatggtcaagaggacaagtggaaagtgagagggaaggtttgctagacaccttcgcttgttatcttgtcaagatagaaaagatagtatcatttcacccttgccagtaaaaacctttccatccacccattctcagcagactccagtattggcacagtcactcactgccattctcacactataacaagaaaagaaatgaagtgcataagtctcctgggaaaagaaccttaaccccttctcrtgccatgactggtgatttcatgactcataagcccctccgtaggcatcattcaagatcaatggcccatgcatgctgtttgcagcagtcaattgagttgaattagaattccaaccatacattttaaaggtatttgtgctgtgtgtatattttgataaaatgttgtgacttmatggcaaacaggtggatgtgtaaaaatggaat

SEQ ID NO: 171 - DNA, 3189 bp, Homo sapiens
tgtctttttccagggcgcaaccatgtcgccatttcttcggattggcttgtccaactttgactgcgggtcctgccagtcttgtcagggcgaggctgttaacccttactgtgctgtgctcgtcaaagagtatgtcgaatcagagaacgggcagatgtatatccagaaaaagcctaccatgtacccaccctgggacagcacttttgatgcccatatcaacaagggaagrgtcatgcagatcattgtgaaaggcaaaaacgtggacctcatctctgaaaccaccgtggagctctactcgctggctgagaggtgcaggaagaacaacgggaagacagaaatatggttagagctgaaacctcaaggccgaatgctaatgaatgcaagatactttctggaaatgagtgacacaaaggacatgaatgaatttgagacggaaggcttctttgctttgcatcagcgccggggtgccatcaagcaggcaaaggtccaccacgtcaagtgccacgagttcactgccaccttcttcccacagcccacattttgctctgtctgccacgagtttgtctggggcctgaacaaacagggctaccagtgccgacaatgcaatgcagcaattcacaagaagtgtattgataaagttatagcaaagtgcacaggatcagctatcaatagccgagaaaccatgttccacaaggagagattcaaaattgacatgccacacagatttaaagtctacaattacaagagcccgaccttctgtgaacactgtgggaccctgctgtggggactggcacggcaaggactcaagtgtgatgcatgtggcatgaatgtgcatcatagatgccagacaaaggtggccaacctttgtggcataaaccagaagctaatggctgaagcgctggccatgatwgagagcactcaacaggctcgctgcttaagagatactgaacagatcttcagagaaggtccggttgaaattggtctcccatgctccatcaaaaatgaagcaaggcygccatgtttaccgacaccgggaaaaagagagcctcagggcatttcctgggagtctccgttggatgaggtggataaaatgtgccatcttccagaacctgaactgaacaaagaaagaccatctctgcagattaaactaaaaattgaggattttatcttgcacaaaatgttggggaaaggaagttttggcaaggtcttcctggcagaattcaagaaaaccaatcaatttttcgcaataaaggccttaaagaaagatgtggtcttgatggacgatgatgttgagtgcacgatggtagagaagagagttctttccttggcctgggagcatccgtttctgacrcacatgttttgtacattycagaccaaggaaaacctcttttttgtgatggagtacctcaacggaggggacttaatgtaccacatccaaagctgccacaagttcgacctttccagagcgacgttttatgctgctgaaatcattcttggtctgcagttccttcattccaaaggaatagtctacagggacctgaagctagataacatcctgttagacaaagatggacatatcaagatygcggattttggaatgtgcaaggagaacatgttaggagatgccaagacgaataccttctgtgggacacctgactacatcgccccagagatcttgctgggtcagaaatacaaccactctgtggactggtggtccttyggggttctcctttatgaaatgctgattggtcagtcgcctttccacgggcaggatgaggaggagctcttccactccatccgcatggacaatcccttttacccacggtggctggagaaggaagcaaaggaccttctggtgaagctcttcgtgmgagaacctgagaagaggctgggcgtgaggggagacatccgccagcaccctttgtttcgggagatcaactgggaggaacttgaacggaaggagattgacccaccgttccggccgaaagtgaaatcaccatttgactgcagcaatttcgacaaagaattcttaaacgagaagccccggctgtcatttgccgacagagcactgatcaacagcatggaccagaatatgttcaggaacttttccttcatgaaccccgggatggagcggctgatatcctgaatcttgcccctccagagacaggaaagaatttgccttctccctgggaactggttcaagagacacwgcttgggttcctttttcaacttggaaaaagaaagaaacactcaacaataaakactgagacccgttcgcccccrtgtgacttttatctgtagcagaaaccaagtctacttcactaatgacgatgccgtgtgtctcgtctcctgacatgtctcacagacgctcctgaagttaggtcattactaaccatagttatttacttgaaagatgggtctccgcacttggaaaggtttcaagacttgatactgcaataaattatggctcttcacctgggcgccaactgctgatcaaygaaatgcttgttgaatcaggggcaaacggagtacagacgtctcaagactgaaacggccccrttgcctggtctagtagcggatctcactcagccgcagacaagtaatcactaacccgttttattctattcctatctgtggatgtrtaaatggctggggggccagccctggataggtttttatgggaattctttacaataaacatagcttgtaacttgagatctacaaatccattcatcctgattgggcatgaaatccatggtcaagaggacaagtggaaagtgagagggaaggtttgctagacaccttcgcttgttatcttgtcaagatagaaaagatagtatcatttcacccttgccagtaaaaacctttccatccacccattctcagcagactccagtattggcacagtcactcactgccattctcacactataacaagaaaagaaatgaagtgcataagtctcctgggaaaagaaccttaaccccttctcrtgccatgactggtgatttcatgactcataagcccctccgtaggcatcattcaagatcaatggcccatgcatgctgtttgcagcagtcaattgagttgaattagaattccaaccatacattttaaaggtatttgtgctgtgtgtatattttgataaaatgttgtgacttmatggcaaacaggtggatgtgtaaaaatggaat

SEQ ID NO: 172 - DNA, 1455 bp, Homo sapiens
agtccccgcgcagtccccgcgcagtcccagcgccaccgggcagcagcggcgccgtgctcgctccagggcgcaaccatgtcgccatttcttcggattggcttgtccaactttgactgcgggtcctgccagtcttgtcagggcgaggctgttaacccttactgtgctgtgctcgtcaaagagtatgtcgaatcagagaacgggcagatgtatatccagaaaaagcctaccatgtacccaccctgggacagcacttttgatgcccatatcaacaagggaagrgtcatgcagatcattgtgaaaggcaaaaacgtggacctcatctctgaaaccaccgtggagctctactcgctggctgagaggtgcaggaagaacaacgggaagacagaaatatggttagagctgaaacctcaaggccgaatgctaatgaatgcaagatactttctggaaatgaacacaaaggacatgaatgaatttgagacggaaggcttctttgctttgcatcagcgccggggtgccatcaagcaggcaaaggtccaccacgtcaagtgccacgagttcactgccaccttcttcccacagcccacattttgctctgtctgccacgagtttgtctggggcctgaacaaacagggctaccagtgccgacaatgcaatgcagcaattcacaagaagtgtattgataaagttatagcaaagtgcacaggatcagctatcaatagccgagaaaccatgttccacaaggagagattcaaaattgacatgccacacagatttaaagtctacaattacaagagcccgaccttctgtgaacactgtgggaccctgctgtggggactggcacggcaaggactcaagtgtgatgcatgtggcatgaatgtgcatcatagatgccagacaaaggtggccaacctttgtggcataaaccagaagctaatggctgaagcgctggccatgatwgagagcactcaacaggctcgctgcttaagagatactgaacagatcttcagagaaggtccggttgaaattggtctcccatgctccatcaaaaatgaagcaaggcygccatgtttaccgacaccgggaaaaagagagcctcagggcatttcctgggagtctccgttggatgaggtggataaaatgtgccatcttccagaacctgaactgaacaaagaaagaccatctctgcagattaaactaaaaattgaggattttatcttgcacaaaatgttggggaaaggaagttttggcaaggtcttcctggcagaattcaagaaaaccaatcaatttttcgcaataaaggccttaaagaaagatgtggtcttgatggacgatgatgttgagtgcacgatggtagagaagagagttctttccttggcctgggagcatccgtttctgacrcacatgttttgtacattycagaccaaggtatggcttctgctccgacaaccctacctc

SEQ ID NO: 173 - DNA, 3242 bp, Homo sapiens
agtccccgcgcagtccccgcgcagtcccagcgccaccgggcagcagcggcgccgtgctcgctccagggcgcaaccatgtcgccatttcttcggattggcttgtccaactttgactgcgggtcctgccagtcttgtcagggcgaggctgttaacccttactgtgctgtgctcgtcaaagagtatgtcgaatcagagaacgggcagatgtatatccagaaaaagcctaccatgtacccaccctgggacagcacttttgatgcccatatcaacaagggaagrgtcatgcagatcattgtgaaaggcaaaaacgtggacctcatctctgaaaccaccgtggagctctactcgctggctgagaggtgcaggaagaacaacgggaagacagaaatatggttagagctgaaacctcaaggccgaatgctaatgaatgcaagatactttctggaaatgagtgacacaaaggacatgaatgaatttgagacggaaggcttctttgctttgcatcagcgccggggtgccatcaagcaggcaaaggtccaccacgtcaagtgccacgagttcactgccaccttcttcccacagcccacattttgctctgtctgccacgagtttgtctggggcctgaacaaacagggctaccagtgccgacaatgcaatgcagcaattcacaagaagtgtattgataaagttatagcaaagtgcacaggatcagctatcaatagccgagaaaccatgttccacaaggagagattcaaaattgacatgccacacagatttaaagtctacaattacaagagcccgaccttctgtgaacactgtgggaccctgctgtggggactggcacggcaaggactcaagtgtgatgcatgtggcatgaatgtgcatcatagatgccagacaaaggtggccaacctttgtggcataaaccagaagctaatggctgaagcgctggccatgatwgagagcactcaacaggctcgctgcttaagagatactgaacagatcttcagagaaggtccggttgaaattggtctcccatgctccatcaaaaatgaagcaaggcygccatgtttaccgacaccgggaaaaagagagcctcagggcatttcctgggagtctccgttggatgaggtggataaaatgtgccatcttccagaacctgaactgaacaaagaaagaccatctctgcagattaaactaaaaattgaggattttatcttgcacaaaatgttggggaaaggaagttttggcaaggtcttcctggcagaattcaagaaaaccaatcaatttttcgcaataaaggccttaaagaaagatgtggtcttgatggacgatgatgttgagtgcacgatggtagagaagagagttctttccttggcctgggagcatccgtttctgacrcacatgttttgtacattycagaccaaggaaaacctcttttttgtgatggagtacctcaacggaggggacttaatgtaccacatccaaagctgccacaagttcgacctttccagagcgacgttttatgctgctgaaatcattcttggtctgcagttccttcattccaaaggaatagtctacagggacctgaagctagataacatcctgttagacaaagatggacatatcaagatygcggattttggaatgtgcaaggagaacatgttaggagatgccaagacgaataccttctgtgggacacctgactacatcgccccagagatcttgctgggtcagaaatacaaccactctgtggactggtggtccttyggggttctcctttatgaaatgctgattggtcagtcgcctttccacgggcaggatgaggaggagctcttccactccatccgcatggacaatcccttttacccacggtggctggagaaggaagcaaaggaccttctggtgaagctcttcgtgmgagaacctgagaagaggctgggcgtgaggggagacatccgccagcaccctttgtttcgggagatcaactgggaggaacttgaacggaaggagattgacccaccgttccggccgaaagtgaaatcaccatttgactgcagcaatttcgacaaagaattcttaaacgagaagccccggctgtcatttgccgacagagcactgatcaacagcatggaccagaatatgttcaggaacttttccttcatgaaccccgggatggagcggctgatatcctgaatcttgcccctccagagacaggaaagaatttgccttctccctgggaactggttcaagagacacwgcttgggttcctttttcaacttggaaaaagaaagaaacactcaacaataaakactgagacccgttcgcccccrtgtgacttttatctgtagcagaaaccaagtctacttcactaatgacgatgccgtgtgtctcgtctcctgacatgtctcacagacgctcctgaagttaggtcattactaaccatagttatttacttgaaagatgggtctccgcacttggaaaggtttcaagacttgatactgcaataaattatggctcttcacctgggcgccaactgctgatcaaygaaatgcttgttgaatcaggggcaaacggagtacagacgtctcaagactgaaacggccccrttgcctggtctagtagcggatctcactcagccgcagacaagtaatcactaacccgttttattctattcctatctgtggatgtrtaaatggctggggggccagccctggataggtttttatgggaattctttacaataaacatagcttgtaacttgagatctacaaatccattcatcctgattgggcatgaaatccatggtcaagaggacaagtggaaagtgagagggaaggtttgctagacaccttcgcttgttatcttgtcaagatagaaaagatagtatcatttcacccttgccagtaaaaacctttccatccacccattctcagcagactccagtattggcacagtcactcactgccattctcacactataacaagaaaagaaatgaagtgcataagtctcctgggaaaagaaccttaaccccttctcrtgccatgactggtgatttcatgactcataagcccctccgtaggcatcattcaagatcaatggcccatgcatgctgtttgcagcagtcaattgagttgaattagaattccaaccatacattttaaaggtatttgtgctgtgtgtatattttgataaaatgttgtgacttmatggcaaacaggtggatgtgtaaaaatggaat

SEQ ID NO: 174 - DNA, 3759 bp, Homo sapiens
tccttttgctctcagatgctgccagggtccctgaagagggaagacacgcggaaacaggcttgcacccagacacgacaccatgcatctcctcggcccctggctcctgctcctgggtaaggactgtggcctgggctagtactggggttctgggatgtcagtgggcactggaggaggaggaaagacccaggcagagaggcgtcaacatagggtagggtgggggcagcggtgtgtatagataaatgtacatacaaatatatatgtttcccatatatacatacacttctctcattgcatcctgctgtctttgtgtatctctgtatttctcccactatcttcagagggaattctttagtctttagaaagctctctgctgggtgcagtggctcatgcctgaaatctcagcactttgtgaggctgaggtgggaggatcacttgaggtcaggagttcaaggccagcttggacaacatagcaagacccctatctctaaaaagaataaaaaattaaacaaattttaaaataaaaaataacttttaaaagaaggctctcatgcccccttagtaatgctttctkatcactgtggtgagttctagaatacttggctttctctgactcaagtaaatgggtttttgagcaccctgaaaccctctacgcctgggagggggcctgcgtctggatcccctgcacctacagagccctagatggtgacctggaaagcttcatcctgttccacaatcctgartataacaagaacacctcgaagtttgatgggacaagactctatgaaagcacaaaggatgggaaggttccttctgagcagaaaagggtgcaattcctgggagacaagaataagaactgcacactgagtatccacccggtgcacctcaatgacagtggtcagctggggctgaggatggagtccaagactgagaaatggatggaacgaatacacctcaatgtctctgaaaggccttttccacctcatatccagctccctccagaaattcaagagtcccaggaagtcactctgacctgcttgctgaatttctcctgctatgggtatccgatccaattgcagtggctcctagagggggttccaatgaggcaggctgctgtcacctcgacctccttgaccatcaagtctgtcttcacccggagcgagctcaagttctccccacagtggagtcaccatgggaagattgtgacctgccagcttcaggatgcagatgggaagttcctctccaatgacacggtgcagctgaacgtgaagcacaccccgaagttggagatcaaggtcactcccagtgatgccatagtgagggagggggactctgtgaccatgacctgcgaggtcagcagcagcaacccggagtacacgacggtatcctggctcaaggatgggacctcgctgaagaagcagaatacattcacgctaaacctgcgcgaagtgaccaaggaccagagtgggaagtactgctgtcaggtctccaatgacgtgggcccgggaaggtcggaagaagtgttcctgcaagtgcagtatgccccggaaccttccacggttcagatcctccactcaccggctgtggagggaagtcaagtcgagtttctttgcatgtcactggccaatcctcttccaacaaattacacgtggtaccacaatgggaaagaaatgcagggaaggacagaggagaaagtccacatcccaaagatcctcccctggcacrctgggacttattcctgtgtggcagaaaacattcttggtactggacagaggggcccgggarctgagytggatgtccagtatcctcccaagaaggtgaccacagtgattcaaaaccccatgccgattcgagaaggagacacagtgaccctttcctgtaactacaattccagtaaccccagtgttacccggtatgaatggaaaccccatggcgcctgggaggagccatcgcttggggtgctgaagatccaaaacgttggctgggacaacacaaccatcgcctgygcagcttgtaatagttggtgctcgtgggcctcccctgtcgccctgaatgtccagtatgccccccgagacgtgagggtccggaaaatcaagcccctttccgagattcactctggaaactcggtcagcctccaatgtgacttctcaagcagccaccccaaagaagtccagttcttctgggagaaaaatggcaggcttctgrggaaagaaagccagctgaattttgactccatctccccagaagatgctgggagttacagctgctgggtgaacaactccataggacagacagcgtccaaggcctggacacttgaagtgctgtatgcacccaggaggctgcgtgtgtccatgagcccgggggaccaagtgatggaggggaagagtgcaaccctgacctgtgagagygacgccaaccctcccgtctcccactacacctggtttgactggaataaccaaagcctccccyaccacagccagaagctgagattggagccggtgaaggtccagcactcgggtgcctactggtgccaggggaccaacagtgtgggcaagggccgttcgcctctcagcaccctcaccgtctactatagcccrgagaccatcggcaggcgagtggctgtgggactcgggtcctgcctcgccatcctcatcctggcaatctgtgggctcaagctccagcgacgttggaagaggacacagagccagcaggggcttcaggagaattccagcggccagagcttctttgtgaggaataaaaaggttagaagggcccccctctctgaagrcccccactccctgggatgctacaatccaatgatggaagatggcattagctacaccaccctgcgctttccmgagatgaacataccacgaactggagatgcagagtcctcagagatgcagagacctcccccggactgcgatgacacggtcacttattcagcattgcacaagcgccaagtgggcgactatgagaacgtcattccagattttccagaagatgaggggattcattactcagagctgatccagtttggggtcggggagcggcctcaggcacaagaaaatgtggactatgtgatcctcaaacattgacactggatgggctgcagcagaggcactgggggcagcgggggccagggaagtccccgagtttccccagacaccgccacatggcttcctcctgcgcgcatgtgcgcrcacacacacacacacgcasacacacacacacacactcactgcggagaaccttgtgcctggctcagagccagtctttttggtgagggtaaccccaaacctccaaaactcctgcccctgttctcttccactctccttgctacccagaaatccatctaaatacctgccctgacatgcacacctccccctgcccccaccacggccactggccatctccacccccagctgcttgtgtccctcctgggatctgctcgtcatcatttttccttcccttctccatctctctggccctctacccctgatctgacatccccactcacgaatattatgcccagtttctgcctctgagggaaagcccagaaaaggacagaaaygaagtagaaaggggcccagtcctggcctggcttctcctttggaagtgaggcattgcacrgggagacgtacgtatcagcggccccttgactctggggactccgggtttgagatggacacactggtgtggattaacctgccagggagacagagctcacaataaaaatggctcagatgccacttcaaagaa

SEQ ID NO: 175 - DNA, 1662 bp, Homo sapiens
ggtgtggtggcttacacctgtaatcccagcactttgggaggccaaggcgggaggatcacttgaggtcaggagttcaagaccagcctggccaacatggcgaaaccctgtctctactagaaatacaraaaaattagctgggtgtggtggtgggcacctgtaatcccagctactcgggaggctgaggcaggaggatcacttgaactggggaggtagaggttacagcgagccaagatcgcgccactgcactccagcctgggtgacagagggaaactccatctcaaaaaaacaacaacacaacaacaacaacaataacaacaaaaaaacaaagcaggactggagagaggtggaatgaagtggcaaggggttcctgaggggtgatttgggacaggacatctaaagccaggtgtacgctcacgtcctcagtsccccaggctcctgcacgggctctgttcttttgcagaaaggccttttccacctcatatccagctccctccagaaattcaagagtcccaggaagtcactctgacctgcttgctgaatttctcctgctatgggtatccgatccaattgcagtggctcctagagggggttccaatgaggcaggctgctgtcacctcgacctccttgaccatcaagtctgtcttcacccggagcgagctcaagttctccccacagtggagtcaccatgggaagattgtgacctgccagcttcaggatgcagatgggaagttcctctccaatgacacggtgcagctgaacgtgaagcgtgagtctccccrgcatgcctgtgggaagggcaaggtctgtgtcaccttctccccagccccgcagggggcatgcacccagggcagggggaagcctgcacagacggcggcatcctccagccctggtcacgccgccttgtcagccctggtgtttcgggaaaaagatttgctctagcctaacagaataaaatggtccatcctcaagccatgacatgaattggggattatctggttaggtctttttgttcccctcttggtggggatttttttcgcatcattatcttgtgcctcattcattcaataaatacgtatcatgaacctactaggtaccaggccttattacggctgccaatggggggcatggggcggtgggcagggtgcagcagtgagcaaaactcttgccccacgcggagccagcgctgcagtgaaagagacagacaacaaatggattaccaaagaaatacagagcatgagccaagacattagaatctggaacaaagcaatgttaacaaagaaatatacaacactattgtaggtagtgatatgtgtgttaggaaaaaaataaggccgagagaggggagtgatggagagagacctctctaagaaggtgagcacttaggccgggtgcggtggctcacgcctgtaatcctagcactttggaaggccgaggcggggggatcacaaggtcaggagatcgagaccatcctggctaacatggtgaaaccccatctctagtaaaaatacaaaaaattagccaggcatgatggcaggcgcctgtagtcccagctacttgggaggccaaggcaggagaatgacatgaacccaggaggcggagcttgcagtgagctgagatcgcaccactgcactccaacctgggtgacgagtgagactccatctc

SEQ ID NO: 176 - DNA, 2553 bp, Homo sapiens
tccttttgctctcagatgctgccagggtccctgaagagggaagacacgcggaaacaggcttgcacccagacacgacaccatgcatctcctcggcccctggctcctgctcctggttctagaatacttggctttctctgactcaagtaaatgggtttttgagcaccctgaaaccctctacgcctgggagggggcctgcgtctggatcccctgcacctacagagccctagatggtgacctggaaagcttcatcctgttccacaatcctgartataacaagaacacctcgaagtttgatgggacaagactctatgaaagcacaaaggatgggaaggttccttctgagcagaaaagggtgcaattcctgggagacaagaataagaactgcacactgagtatccacccggtgcacctcaatgacagtggtcagctggggctgaggatggagtccaagactgagaaatggatggaacgaatacacctcaatgtctctgaaaggccttttccacctcatatccagctccctccagaaattcaagagtcccaggaagtcactctgacctgcttgctgaatttctcctgctatgggtatccgatccaattgcagtggctcctagagggggttccaatgaggcaggctgctgtcacctcgacctccttgaccatcaagtctgtcttcacccggagcgagctcaagttctccccacagtggagtcaccatgggaagattgtgacctgccagcttcaggatgcagatgggaagttcctctccaatgacacggtgcagctgaacgtgaagcacaccccgaagttggagatcaaggtcactcccagtgatgccatagtgagggagggggactctgtgaccatgacctgcgaggtcagcagcagcaacccggagtacacgacggtatcctggctcaaggatgggacctcgctgaagaagcagaatacattcacgctaaacctgcgcgaagtgaccaaggaccagagtgggaagtactgctgtcaggtctccaatgacgtgggcccgggaaggtcggaagaagtgttcctgcaagtgcagtatgccccggaaccttccacggttcagatcctccactcaccggctgtggagggaagtcaagtcgagtttctttgcatgtcactggccaatcctcttccaacaaattacacgtggtaccacaatgggaaagaaatgcagggaaggacagaggagaaagtccacatcccaaagatcctcccctggcacrctgggacttattcctgtgtggcagaaaacattcttggtactggacagaggggcccgggarctgagytggatgtccagtatcctcccaagaaggtgaccacagtgattcaaaaccccatgccgattcgagaaggagacacagtgaccctttcctgtaactacaattccagtaaccccagtgttacccggtatgaatggaaaccccatggcgcctgggaggagccatcgcttggggtgctgaagatccaaaacgttggctgggacaacacaaccatcgcctgygcagcttgtaatagttggtgctcgtgggcctcccctgtcgccctgaatgtccagtatgccccccgagacgtgagggtccggaaaatcaagcccctttccgagattcactctggaaactcggtcagcctccaatgtgacttctcaagcagccaccccaaagaagtccagttcttctgggagaaaaatggcaggcttctgrggaaagaaagccagctgaattttgactccatctccccagaagatgctgggagttacagctgctgggtgaacaactccataggacagacagcgtccaaggcctggacacttgaagtgctgtatgcacccaggaggctgcgtgtgtccatgagcccgggggaccaagtgatggaggggaagagtgcaaccctgacctgtgagagygacgccaaccctcccgtctcccactacacctggtttgactggaataaccaaagcctccccyaccacagccagaagctgagattggagccggtgaaggtccagcactcgggtgcctactggtgccaggggaccaacagtgtgggcaagggccgttcgcctctcagcaccctcaccgtctactatagcccrgagaccatcggcaggcgagtggctgtgggactcgggtcctgcctcgccatcctcatcctggcaatctgtgggctcaagctccagcgacgagatgcagagtcctcagagatgcagagacctcccccggactgcgatgacacggtcacttattcagcattgcacaagcgccaagtgggcgactatgagaacgtcattccagattttccagaagatgaggggattcattactcagagctgatccagtttggggtcggggagcggcctcaggcacaagaaaatgtggactatgtgatcctcaaacattgacactggatgggctgcagcagaggcactgggggcagcgggggccagggaaatggacacactggtgtggattaacctgccagggagacagagctcacaataaaaatggctcagatgccacttcaaag

SEQ ID NO: 177 - DNA, 2333 bp, Homo sapiens
ggactgcrttgggtgcagtggttcccgcctgtaaccccagcactttgggaggctgagatcggaggatcgtttgagcycaggagtttgagaccagcctgggtaacatggcaagaccctgtctctacaaaatgtttaaaaaactagctaggtgtggtggcttacacctgtaatcccagcactttgggaggccaaggcgggaggatcacttgaggtcaggagttcaagaccagcctggccaacatggcgaaaccctgtctctactagaaatacaraaaaattagctgggtgtggtggtgggcacctgtaatcccagctactcgggaggctgaggcaggaggatcacttgaactggggaggtagaggttacagcgagccaagatcgcgccactgcactccagcctgggtgacagagggaaactccatctcaaaaaaacaacaacacaacaacaacaacaataacaacaaaaaaacaaagcaggactggagagaggtggaatgaagtggcaaggggttcctgaggggtgatttgggacaggacatctaaagccaggtgtacgctcacgtcctcagtsccccaggctcctgcacgggctctgttcttttgcagaaaggccttttccacctcatatccagctccctccagaaattcaagagtcccaggaagtcactctgacctgcttgctgaatttctcctgctatgggtatccgatccaattgcagtggctcctagagggggttccaatgaggcaggctgctgtcacctcgacctccttgaccatcaagtctgtcttcacccggagcgagctcaagttctccccacagtggagtcaccatgggaagattgtgacctgccagcttcaggatgcagatgggaagttcctctccaatgacacggtgcagctgaacgtgaagcatcctcccaagaaggtgaccacagtgattcaaaaccccatgccgattcgagaaggagacacagtgaccctttcctgtaactacaattccagtaaccccagtgttacccggtatgaatggaaaccccatggcgcctgggaggagccatcgcttggggtgctgaagatccaaaacgttggctgggacaacacaaccatcgcctgygcagcttgtaatagttggtgctcgtgggcctcccctgtcgccctgaatgtccagtatgccccccgagacgtgagggtccggaaaatcaagcccctttccgagattcactctggaaactcggtcagcctccaatgtgacttctcaagcagccaccccaaagaagtccagttcttctgggagaaaaatggcaggcttctgrggaaagaaagccagctgaattttgactccatctccccagaagatgctgggagttacagctgctgggtgaacaactccataggacagacagcgtccaaggcctggacacttgaagtgctgtatgcacccaggaggctgcgtgtgtccatgagcccgggggaccaagtgatggaggggaagagtgcaaccctgacctgtgagagygacgccaaccctcccgtctcccactacacctggtttgactggaataaccaaagcctccccyaccacagccagaagctgagattggagccggtgaaggtccagcactcgggtgcctactggtgccaggggaccaacagtgtgggcaagggccgttcgcctctcagcaccctcaccgtctactatagcccrgagaccatcggcaggcgagtggctgtgggactcgggtcctgcctcgccatcctcatcctggcaatctgtgggctcaagctccagcgacgttggaagaggacacagagccagcaggggcttcaggagaattccagcggccagagcttctttgtgaggaataaaaaggttagaagggcccccctctctgaagrcccccactccctgggatgctacaatccaatgatggaagatggcattagctacaccaccctgcgctttccmgagatgaacataccacgaactggagatgcagagtcctcagagatgcagagacctcccccggactgcgatgacacggtcacttattcagcattgcacaagcgccaagtgggcgactatgagaacgtcattccagattttccagaagatgaggggattcattactcagagctgatccagtttggggtcggggagcggcctcaggcacaagaaaatgtggactatgtgatcctcaaacattgacactggatgggctgcagcagaggcactgggggcagcgggggccagggaaatggacacactggtgtggattaacctgccagggagacagagctcacaataaaaatggctcagatgccacttcaaag

SEQ ID NO: 178 - DNA, 3287 bp, Homo sapiens
tccttttgctctcagatgctgccagggtccctgaagagggaagacacgcggaaacaggcttgcacccagacacgacaccatgcatctcctcggcccctggctcctgctcctggttctagaatacttggctttctctgactcaagtaaatgggtttttgagcaccctgaaaccctctacgcctgggagggggcctgcgtctggatcccctgcacctacagagccctagatggtgacctggaaagcttcatcctgttccacaatcctgartataacaagaacacctcgaagtttgatgggacaagactctatgaaagcacaaaggatgggaaggttccttctgagcagaaaagggtgcaattcctgggagacaagaataagaactgcacactgagtatccacccggtgcacctcaatgacagtggtcagctggggctgaggatggagtccaagactgagaaatggatggaacgaatacacctcaatgtctctgaaaggccttttccacctcatatccagctccctccagaaattcaagagtcccaggaagtcactctgacctgcttgctgaatttctcctgctatgggtatccgatccaattgcagtggctcctagagggggttccaatgaggcaggctgctgtcacctcgacctccttgaccatcaagtctgtcttcacccggagcgagctcaagttctccccacagtggagtcaccatgggaagattgtgacctgccagcttcaggatgcagatgggaagttcctctccaatgacacggtgcagctgaacgtgaagcacaccccgaagttggagatcaaggtcactcccagtgatgccatagtgagggagggggactctgtgaccatgacctgcgaggtcagcagcagcaacccggagtacacgacggtatcctggctcaaggatgggacctcgctgaagaagcagaatacattcacgctaaacctgcgcgaagtgaccaaggaccagagtgggaagtactgctgtcaggtctccaatgacgtgggcccgggaaggtcggaagaagtgttcctgcaagtgcagtatgccccggaaccttccacggttcagatcctccactcaccggctgtggagggaagtcaagtcgagtttctttgcatgtcactggccaatcctcttccaacaaattacacgtggtaccacaatgggaaagaaatgcagggaaggacagaggagaaagtccacatcccaaagatcctcccctggcacrctgggacttattcctgtgtggcagaaaacattcttggtactggacagaggggcccgggarctgagytggatgtccagtatcctcccaagaaggtgaccacagtgattcaaaaccccatgccgattcgagaaggagacacagtgaccctttcctgtaactacaattccagtaaccccagtgttacccggtatgaatggaaaccccatggcgcctgggaggagccatcgcttggggtgctgaagatccaaaacgttggctgggacaacacaaccatcgcctgygcagcttgtaatagttggtgctcgtgggcctcccctgtcgccctgaatgtccagtatgccccccgagacgtgagggtccggaaaatcaagcccctttccgagattcactctggaaactcggtcagcctccaatgtgacttctcaagcagccaccccaaagaagtccagttcttctgggagaaaaatggcaggcttctgrggaaagaaagccagctgaattttgactccatctccccagaagatgctgggagttacagctgctgggtgaacaactccataggacagacagcgtccaaggcctggacacttgaagtgctgtatgcacccaggaggctgcgtgtgtccatgagcccgggggaccaagtgatggaggggaagagtgcaaccctgacctgtgagagygacgccaaccctcccgtctcccactacacctggtttgactggaataaccaaagcctccccyaccacagccagaagctgagattggagccggtgaaggtccagcactcgggtgcctactggtgccaggggaccaacagtgtgggcaagggccgttcgcctctcagcaccctcaccgtctactatagcccrgagaccatcggcaggcgagtggctgtgggactcgggtcctgcctcgccatcctcatcctggcaatctgtgggctcaagctccagcgacgttggaagaggacacagagccagcaggggcttcaggagaattccagcggccagagcttctttgtgaggaataaaaaggttagaagggcccccctctctgaagrcccccactccctgggatgctacaatccaatgatggaagatggcattagctacaccaccctgcgctttccmgagatgaacataccacgaactggagatgcagagtcctcagagatgcagagacctcccccggactgcgatgacacggtcacttattcagcattgcacaagcgccaagtgggcgactatgagaacgtcattccagattttccagaagatgaggggattcattactcagagctgatccagtttggggtcggggagcggcctcaggcacaagaaaatgtggactatgtgatcctcaaacattgacactggatgggctgcagcagaggcactgggggcagcgggggccagggaagtccccgagtttccccagacaccgccacatggcttcctcctgcgcgcatgtgcgcrcacacacacacacacgcasacacacacacacacactcactgcggagaaccttgtgcctggctcagagccagtctttttggtgagggtaaccccaaacctccaaaactcctgcccctgttctcttccactctccttgctacccagaaatccatctaaatacctgccctgacatgcacacctccccctgcccccaccacggccactggccatctccacccccagctgcttgtgtccctcctgggatctgctcgtcatcatttttccttcccttctccatctctctggccctctacccctgatctgacatccccactcacgaatattatgcccagtttctgcctctgagggaaagcccagaaaaggacagaaaygaagtagaaaggggcccagtcctggcctggcttctcctttggaagtgaggcattgcacrgggagacgtacgtatcagcggccccttgactctggggactccgggtttgagatggacacactggtgtggattaacctgccagggagacagagctcacaataaaaatggctcagatgccacttcaaagaa

SEQ ID NO: 179 - DNA, 2748 bp, Homo sapiens
tccttttgctctcagatgctgccagggtccctgaagagggaagacacgcggaaacaggcttgcacccagacacgacaccatgcatctcctcggcccctggctcctgctcctggttctagaatacttggctttctctgactcaagtaaatgggtttttgagcaccctgaaaccctctacgcctgggagggggcctgcgtctggatcccctgcacctacagagccctagatggtgacctggaaagcttcatcctgttccacaatcctgartataacaagaacacctcgaagtttgatgggacaagactctatgaaagcacaaaggatgggaaggttccttctgagcagaaaagggtgcaattcctgggagacaagaataagaactgcacactgagtatccacccggtgcacctcaatgacagtggtcagctggggctgaggatggagtccaagactgagaaatggatggaacgaatacacctcaatgtctctgaaaggccttttccacctcatatccagctccctccagaaattcaagagtcccaggaagtcactctgacctgcttgctgaatttctcctgctatgggtatccgatccaattgcagtggctcctagagggggttccaatgaggcaggctgctgtcacctcgacctccttgaccatcaagtctgtcttcacccggagcgagctcaagttctccccacagtggagtcaccatgggaagattgtgacctgccagcttcaggatgcagatgggaagttcctctccaatgacacggtgcagctgaacgtgaagcacaccccgaagttggagatcaaggtcactcccagtgatgccatagtgagggagggggactctgtgaccatgacctgcgaggtcagcagcagcaacccggagtacacgacggtatcctggctcaaggatgggacctcgctgaagaagcagaatacattcacgctaaacctgcgcgaagtgaccaaggaccagagtgggaagtactgctgtcaggtctccaatgacgtgggcccgggaaggtcggaagaagtgttcctgcaagtgcagtatgccccggaaccttccacggttcagatcctccactcaccggctgtggagggaagtcaagtcgagtttctttgcatgtcactggccaatcctcttccaacaaattacacgtggtaccacaatgggaaagaaatgcagggaaggacagaggagaaagtccacatcccaaagatcctcccctggcacrctgggacttattcctgtgtggcagaaaacattcttggtactggacagaggggcccgggarctgagytggatgtccagtatcctcccaagaaggtgaccacagtgattcaaaaccccatgccgattcgagaaggagacacagtgaccctttcctgtaactacaattccagtaaccccagtgttacccggtatgaatggaaaccccatggcgcctgggaggagccatcgcttggggtgctgaagatccaaaacgttggctgggacaacacaaccatcgcctgygcagcttgtaatagttggtgctcgtgggcctcccctgtcgccctgaatgtccagtatgccccccgagacgtgagggtccggaaaatcaagcccctttccgagattcactctggaaactcggtcagcctccaatgtgacttctcaagcagccaccccaaagaagtccagttcttctgggagaaaaatggcaggcttctgrggaaagaaagccagctgaattttgactccatctccccagaagatgctgggagttacagctgctgggtgaacaactccataggacagacagcgtccaaggcctggacacttgaagtgctgtatgcacccaggaggctgcgtgtgtccatgagcccgggggaccaagtgatggaggggaagagtgcaaccctgacctgtgagagygacgccaaccctcccgtctcccactacacctggtttgactggaataaccaaagcctccccyaccacagccagaagctgagattggagccggtgaaggtccagcactcgggtgcctactggtgccaggggaccaacagtgtgggcaagggccgttcgcctctcagcaccctcaccgtctactatagcccrgagaccatcggcaggcgagtggctgtgggactcgggtcctgcctcgccatcctcatcctggcaatctgtgggctcaagctccagcgacgttggaagaggacacagagccagcaggggcttcaggagaattccagcggccagagcttctttgtgaggaataaaaaggttagaagggcccccctctctgaagrcccccactccctgggatgctacaatccaatgatggaagatggcattagctacaccaccctgcgctttccmgagatgaacataccacgaactggagatgcagagtcctcagagatgcagagacctcccccggactgcgatgacacggtcacttattcagcattgcacaagcgccaagtgggcgactatgagaacgtcattccagattttccagaagatgaggggattcattactcagagctgatccagtttggggtcggggagcggcctcaggcacaagaaaatgtggactatgtgatcctcaaacattgacactggatgggctgcagcagaggcactgggggcagcgggggccagggaaatggacacactggtgtggattaacctgccagggagacagagctcacaataaaaatggctcagatgccacttcaaag

SEQ ID NO: 180 - DNA, 1790 bp, Homo sapiens
gtgaatctctggggccaggaagaccctgctgcccggaagagcctcatgttccgtgggggctgggcrgacatacatatacgggctccaggctgaacggctcgggccacttacacaccactgcctgataaccatgctggctgccacagtcctgaccctggccctgctgggcaatgsccatgcctgctccaaaggcacmtcgcacgaggcaggcatcgtgtgccgcatcaccaagcctgccctcctggtgttgaaccacgagactgccaaggtgatccagaccgccttccagcgagccagctacccagatatcacgggcgagaaggccatgatgctccttggccaagtcaagtatgggttgcacaacatccagatcagccacttgtccatcgccagcagccaggtggagctggtggaagccaagtccattgatgtctccattcagaacgtgtctgtggtcttcaaggggaccctgaagtatggctacaccactgcctggtggctgggtattgatcagtccattgacttcgagatcgactctgccattgacctccagatcaacacacagctgacctgtgactctggtagagtgyggaccgatgcccctgactgctacctgtctttccataagctgctcctgcatctccaaggggagcgagagcctggrtggatcaagcagctgttcacaaatttcatctccttcaccctgaagctggtcctgaagkgacagatctgcaaagagatcaacgtcatctctaacatcatggcygattttgtccagacaagggctgccagcatcctttcagatggagacattggggtggacatttccctgacaggtgatcccgtcatcacagcctcctacctggagtcccatcacaagggtcayttcatctacaagaatgtctcagaggacctccccctccccaccttctcgcccacactgctgggggactcccgcatgctgtacttctggttctctgagygagtcttycactcgctggccaaggtagctttccaggatggccgcctcatgctcagcctgatgggagaygagttcaaggcagtgctggagacctggggcttcaacaccaaccaggaaatcttcyaagaggttgtcggcrgcttccccagccaggcccaagtcaccgtccactgcctcaagatgcccaagatctcctgccaaaacaagggagtcgtggtcaattcttcagtgatggtgaaattcctctttccacgcccagaccagcaacattctgtagcttacacatttgaagaggatatcgtgactaccgtccagscctcctattctaagaaaaagctcttcttaagcctcttggatttccagattacaccaaagactgtttccaacttgactgagagcagctccgagtccrtccagagcttcctgcagtcaatgatcaccgctgtrggcatccctgaggtcatgtctcggctcgaggtagtgtttacagccctcatgaacagcaaaggcrtgagcctcttcgrcatcatcaaccctgagattatcactcragatggcttcctgctgctgcagatggactttggcttccctgagcacctgctgrtggatttcctccagagcttgagctagaagtctccaaggaggtcgggatggggcttgtagcagaaggcaagcaccaggctcacagctggaaccctggtgtctcctccagcrtggtggaagttgggttaggagtacggagatggagattggctcccaactcctccctatcctaaaggcccactggcattaaagtgctgtatccaag

SEQ ID NO: 181 - DNA, 1610 bp, Homo sapiens
gtgaatctctggggccaggaagaccctgctgcccggaagagcctcatgttccgtgggggctgggcrgacatacatatacgggctccaggctgaacggctcgggccacttacacaccactgcctgataaccatgctggctgccacagtcctgaccctggccctgctgggcaatgsccatgcctgctccaaaggcacmtcgcacgaggcaggcatcgtgtgccgcatcaccaagcctgccctcctggtgttgaaccacgagactgccaaggtgatccagaccgccttccagcgagccagctacccagatatcacgggcgagaaggccatgatgctccttggccaagtcaagtatgggttgcacaacatccagatcagccacttgtccatcgccagcagccaggtggagctggtggaagccaagtccattgatgtctccattcagaacgtgtctgtggtcttcaaggggaccctgaagtatggctacaccactgcctggtggctgggtattgatcagtccattgacttcgagatcgactctgccattgacctccagatcaacacacagctgacctgtgactctggtagagtgyggaccgatgcccctgactgctacctgtctttccataagctgctcctgcatctccaaggggagcgagagcctggrtggatcaagcagctgttcacaaatttcatctccttcaccctgaagctggtcctgaagkgacagatctgcaaagagatcaacgtcatctctaacatcatggcygattttgtccagacaagggctgccagcatcctttcagatggagacattggggtggacatttccctgacaggtgatcccgtcatcacagcctcctacctggagtcccatcacaaggcagtgctggagacctggggcttcaacaccaaccaggaaatcttcyaagaggttgtcggcrgcttccccagccaggcccaagtcaccgtccactgcctcaagatgcccaagatctcctgccaaaacaagggagtcgtggtcaattcttcagtgatggtgaaattcctctttccacgcccagaccagcaacattctgtagcttacacatttgaagaggatatcgtgactaccgtccagscctcctattctaagaaaaagctcttcttaagcctcttggatttccagattacaccaaagactgtttccaacttgactgagagcagctccgagtccrtccagagcttcctgcagtcaatgatcaccgctgtrggcatccctgaggtcatgtctcggctcgaggtagtgtttacagccctcatgaacagcaaaggcrtgagcctcttcgrcatcatcaaccctgagattatcactcragatggcttcctgctgctgcagatggactttggcttccctgagcacctgctgrtggatttcctccagagcttgagctagaagtctccaaggaggtcgggatggggcttgtagcagaaggcaagcaccaggctcacagctggaaccctggtgtctcctccagcrtggtggaagttgggttaggagtacggagatggagattggctcccaactcctccctatcctaaaggcccactggcattaaagtgctgtatccaag

SEQ ID NO: 182 - DNA, 3252 bp, Homo sapiens
tcgcttccatccctggccggccrgcgggcgggctccccagccaggccgctgcacctgtcaggggaacaagctggaggagcaggacccyagacctctgcagcccataccaggtctcatggaggggaacaagctggaggagcaggactctagccctccacagtccactccagggctcatgaaggggaacaagcgtgaggagcaggggctgggccccgaacctgcggcgccccagcagcccacggcggaggaggaggccctgatcgagttccaccgctcctacygagagctcttcgagttcttctgcaacaacaccaccatccacggcgccatccgcctggtgtgctcccagcacaaccgcatgaagacggccttctgggcagtgctgtggctctgcacctttggcatgatgtactggcaattcggcctgcttttcggagagtacttcagctaccccgtcagcctcaacatcaacctcaactcggacaagctcgtcttccccgcagtgaccatctgcaccctcaatccctacaggtacccggaaattaaagaggagctggaggagctggaccgcatcacagagcagacgctctttgacctgtacaaatacagctccttcaccactctcgtggccggctcccgcagccgtcgcgacctgcgggggactctgccgcaccccttgcagcgcctgagggtcccgcccccgcctcacggggcccgtcgagcccgtagcgtggcctccagcttgcgggacaacaacccccaggtggactggaaggactggaagatcggcttccagctgtgcaaccagaacaaatcggactgcttctaccagacatactcatcaggggtggatgcggtgagggagtggtaccgcttccactacatcaacatcctgtcgaggctgccagagactctgccatccctggaggaggacacgctgggcaacttcatcttcgcctgccgcttcaaccaggtctcctgcaaccaggcgaattactctcacttccaccacccgatgtatggaaactgctatactttcaatgacaagaacaactccaacctctggatgtcttccatgcctggaatcaacaayggtctgtccctgatgctgcgcrcagagcagaatgacttcattcccctgctgtccacagtgactggggcccgggtaatggtgcacgggcaggatgaacctgcctttatggatgatggtggctttaacttgcggcctggcgtggagacctccatcagcatgaggaaggaaaccctggacagacttgggggcgattatggcgactgcaccaagaatggcagtgatgttcctgttgagaacctttacccttcaaagtacacacagcaggtgtgtattcactcctgcttccaggagagcatgatcaaggagtgtggctgtgcctacatcttctatccgcggccccagaacgtggagtactgtgactacagaaagcacagttcctgggggtactgctactataagctccaggttgacttctcctcagaccacctgggctgtttcaccaagtgccggaagccatgcagcgtgaccagctaccagctctctgctggttactcacgatggccctckgtgacatcccaggaatgggtcttccagatgctatcgcgacagaacaattacaccgtcaacaacaagagaaatggagtggccaaagtcaacatcttcttcaaggagctgaactacaaaaccaattctgagtctccctctgtcacgatggtcaccctcctgtccaacctgggcagccagtggagcctgtggttcggctcctyggtgttgtctgtggtggagatggctgagctcgtctttgacctgctggtcatcatgttcctcatgctgctccgaaggttccgaagccgatactggtctccaggccgagggggcaggggtgctcaggaggtagcctccaccctggcatcctcccctccttcccacttctkcccccaccccatgtctctgtccttgtcccagccaggccctgctccctctccagccttgacagcccctccccctgcctatgccaccctgggcccccgcccatctccagggggctctgcaggggccagttcctccrcctgtcctctgggggggccctgagagggaaggagaggtttctcacaccaaggcagatgctcctctggtgggagggtgctggccctggcaagattgaaggatgtgcagggcttcctctcagagccgcccaaactgccgttgatgtgtggaggggaagcaagatgggtaagggctcaggaagttgctccaagaacagtagctgatgaagctgcccagaagtgccttggctccagccctgtaccccttggtactgcctctgaacactctggtttccccacccaactgcggctaagtctctttttcccttggatcagccaagcgaaacttggagctttgacaaggaactttcctaagaaaccgctgataaccaggacaaaacacaaccaagggtacacgcaggcatgcacgggtttcctgcccagcgacggcttaagccagcccccgactggcctggccacactgctctccagtagcacagatgtctgctcctcctcttgaacttgggtgggaaaccccacccaaaagccccctttgttacttaggcaattccccttccctgactcccgagggctagggctagagcagacccgggtaagtaaaggcagacccagggctcctctagcctcatacccgtgccctcacagagccatgccccggcacctctgccctgtgtctttcatacctctacatgtctgcttgagatatttcctcagcctgaaagtttccccaaccatctgccagagaactcctatgcatcccttagaaccctgctcagacaccattacttttgtgaacgcttctgccacatcttgtcttccccaaaattgatcactccgccttctcctgggctcccgtagcacactataacatctgctggagtgttgctgttgcaccatactttcttgtacatttgtgtctcccttcccaactagactgtaagtgccttgcggtcagggactgaatcttgcccgtttatgtatgctccatgtctagcccatcatcctgcttggagcaagtaggcaggagctcaataaatgtttgttgcatgaaggaatgtctggagagctggatggggcatcatgaagagggtagggggtggatacaagtcatcacccaagcttctgggaggtcctggggctgggagagggtac

SEQ ID NO: 183 - DNA, 2855 bp, Homo sapiens
gaccatcgaaaagccagggtcctcccagctgggcactactgcccctcgctaggaatatgggcctcgcaggtcggcagcgtgaggtcctctgtgccaccttccatcagtaggaacccagccatggtgaacgaagccwgaggaaacagcagcctcaacccctgcttggagggcagtgccagcagtggcagtgagagctccaaagatagttcgagatgttccaccccgggcctggacccygagcggcatgagagactccgggagaagatgaggcsgcrattggaatctggtgacaagtggttctccctggaattcttccctcctcraactgctgagggagctgtcaatctcatctcaaggtttgaccggatggcagcaggtggccccctctacatagacgtgacctggcacccagcaggtgaccctggctcagacaaggagacctcctccatgatgatcgccagcacmrccgtgaactactgtggcctggagaccatcctgcacatgacctgctgccgtcagcgcctggaggagatcacrggccatctgcacaaagctaagcagctgggcctgaagaacatcatggcgctgcrgggagacccaataggtgaccagtgggaagaggaggagggaggcttcaactacgcagtggacctggtgaagcacatcygaagtgagtttggtgactactttgacatctgtgtggcaggttaccccaaaggccaccccgaagcagggagctttgaggctgacctgaagcacttgaaggagaaggtgtctgcgggagycgatttcatcaycaygcagcttttctttgaggctgacacattyttccgctttgtgaaggcatgcaccgacatgggcatcacttgccccatcgtccccgggatctttcccatccagggctaccactcccttcggcagcttgtgaagctgtccaagctggaggtgccacaggagatcaaggacgtgattgagccaatcaaagacaacgatgctgccatccgcaactatggcatcgagctggccgtgagcctgtgccaggagcttctggccagtggcttggtgccaggcctccacttctacacccycarcygcgagatggctaccacagaggtgctgaagcgcctggggatgtggactgaggaccccaggcgtcccctaccctgggctctcagygcccaccccaagygcygagaggaagatgtacgtcccatcttctgggcctccagaccaaagagttasatctaccgtacccaggagtgggacgagttccctaacgrccgctggggcaattcctcttcccctgcctttggggagctgaaggactactacctcttctacctgaagagcaagtcccccaaggaggagctgctgaagatgtggggggakgagctgaccagtgaagmaagtgtctttgaagtcttygttctttacctctcgggagaaccaaaccggaatggtcacaaagtgacttgcctgccctggaacgatgagcccctggcggctgagaccagcctgctgaaggaggagctgctgcgggtgaaccgccagggcatcctcaccatcaactcacagcccaacatcaacgggaagccrtcctccgaccccatcgtgggctggggccccagcgggggctatgtcttccagaaggcctacttagagtttttcacttcccgcgagacagcggaagcacttctgcaagtgctgaagaagtacgagctccgggttaattaccaccttgtcaatgtgaagggtgaaaacatcaccaatgcccctgaactgcagccgaatgctgtcacttggggcatcttccctgrgygagagatcatccagcccaccgtagtggatcccgtcagcttcatgttctggwaggacraggcctttgccctgtggattgagcrgtggggaaagctgtatgaggaggagtccccgtcccgcaccatcatccagtacatccacgacaactacttcctggtcaacctggtggacaatgacttcccactggacaactgcctctggcaggtggtggaagacacattggagcttctcaacaggcccacccagaatgcgagagaaayggaggctccatgaccctgcgtcctgacgccctgcgttggagccactcctgtcccgccttcctcctccacagtgctgcttctcttgggaactccactctccttcgtgtctctcccaccccggcctccactcccccacctgacaatggcagctagactggagtgaggcttccaggctcttcctggacctgagtcggccccacatgggaacctagtactctctgctctagccaggagtctgtgctcttttggtggggagcacttgcgtcctgcagaggaccacagtgggtggcacctcctgagaaggcgaggagagtggttgttgccaactaagccctcgaaccaaggcagcctccagagccagcctgggactcccagtgaacttacmcttggagcccgtgcagtacaggcaaaacacgcaagggcatcaggcactggtggcatcgtagaagagatgtggcaaagtgctgtacccttccacctcctagaggtgggcagctgggccccacctacttgtgactgaaggggcacaccactgccctgcctgcccacttagccgtccatggcaccagccccctggatgggcattgggctgacacctaccatgctgctttttggcacagttgtctattctgagccttgagagaaaaagtgccccttaagggttgaaggcagtctgaacccttgtgcttggtggggctcgtggccttccccttttgcctggctgtggaggcctgatgctgccccgttccctgtcagaggctaagatgagatttgcca

SEQ ID NO: 184 - DNA, 3458 bp, Homo sapiens
gccacagtggtgcggccggcggccgagcgttctgagtcacccgggactggagggccttcttcctgtgtggaaatacagygcctccggcttgaacctgccactcaggtgtcttgatgtgtcgggggtgtggctgcctgccccctgatgctccctgccccaccctgtgcagtaggaacccagccatggtgaacgaagccwgaggaaacagcagcctcaacccctgcttggagggcagtgccagcagtggcagtgagagctccaaagatagttcgagatgttccaccccgggcctggacccygagcggcatgagagactccgggagaagatgaggcsgcrattggaatctggtgacaagtggttctccctggaattcttccctcctcraactgctgagggagctgtcaatctcatctcaaggtttgaccggatggcagcaggtggccccctctacatagacgtgacctggcacccagcaggtgaccctggctcagacaaggagacctcctccatgatgatcgccagcacmrccgtgaactactgtggcctggagaccatcctgcacatgacctgctgccgtcagcgcctggaggagatcacrggccatctgcacaaagctaagcagctgggcctgaagaacatcatggcgctgcrgggagacccaataggtgaccagtgggaagaggaggagggaggcttcaactacgcagtggacctggtgaagcacatcygaagtgagtttggtgactactttgacatctgtgtggcaggttaccccaaaggccaccccgaagcagggagctttgaggctgacctgaagcacttgaaggagaaggtgtctgcgggagycgatttcatcaycaygcagcttttctttgaggctgacacattyttccgctttgtgaaggcatgcaccgacatgggcatcacttgccccatcgtccccgggatctttcccatccagggctaccactcccttcggcagcttgtgaagctgtccaagctggaggtgccacaggagatcaaggacgtgattgagccaatcaaagacaacgatgctgccatccgcaactatggcatcgagctggccgtgagcctgtgccaggagcttctggccagtggcttggtgccaggcctccacttctacacccycarcygcgagatggctaccacagaggtgctgaagcgcctggggatgtggactgaggaccccaggcgtcccctaccctgggctctcagygcccaccccaagygcygagaggaagatgtacgtcccatcttctgggcctccagaccaaagagttasatctaccgtacccaggagtgggacgagttccctaacgrccgctggggcaattcctcttcccctgcctttggggagctgaaggactactacctcttctacctgaagagcaagtcccccaaggaggagctgctgaagatgtggggggakgagctgaccagtgaagmaagtgtctttgaagtcttygttctttacctctcgggagaaccaaaccggaatggtcacaaagtgacttgcctgccctggaacgatgagcccctggcggctgagaccagcctgctgaaggaggagctgctgcgggtgaaccgccagggcatcctcaccatcaactcacagcccaacatcaacgggaagccrtcctccgaccccatcgtgggctggggccccagcgggggctatgtcttccagaaggcctacttagagtttttcacttcccgcgagacagcggaagcacttctgcaagtgctgaagaagtacgagctccgggttaattaccaccttgtcaatgtgaagggtgaaaacatcaccaatgcccctgaactgcagccgaatgctgtcacttggggcatcttccctgrgygagagatcatccagcccaccgtagtggatcccgtcagcttcatgttctggwaggacraggcctttgccctgtggattgagcrgtggggaaagctgtatgaggaggagtccccgtcccgcaccatcatccagtacatccacgacaactacttcctggtcaacctggtggacaatgacttcccactggacaactgcctctggcaggtggtggaagacacattggagcttctcaacaggcccacccagaatgcgagagaaayggaggctccatgaccctgcgtcctgacgccctgcgttggagccactcctgtcccgccttcctcctccacagtgctgcttctcttgggaactccactctccttcgtgtctctcccaccccggcctccactcccccacctgacaatggcagctagactggagtgaggcttccaggctcttcctggacctgagtcggccccacatgggaacctagtactctctgctctagccaggagtctgtgctcttttggtggggagcacttgcgtcctgcagaggaccacagtgggtggcacctcctgagaaggcgaggagagtggttgttgccaactaagccctcgaaccaaggcagcctccagagccagcctgggactcccagtgaacttacmcttggagcccgtgcagtacaggcaaaacacgcaagggcatcaggcactggtggcatcgtagaagagatgtggcaaagtgctgtacccttccacctcctagaggtgggcagctgggccccacctacttgtgactgaaggggcacaccactgccctgcctgcccacttagccgtccatggcaccagccccctggatgggcattgggctgacacctaccatgctgctttttggcacagttgtctattctgagccttgagagaaaaagtgccccttaagggttgaaggcagtctgaacccttgtgcttggtggggctcgtggccttccccttttgcctggctgtggaggcctgatgctgccccgttccctgtcagaggctaagatgagatttgccactgggatttcttcgctgctctagctggcaggacacatcccggcctcttcttccacccattcccccatgtggctgaagacattccaacaatggggtgggcccataatagttagccctcagtcagttcccggagcacagccctgggagggggctatttctctccccactgaaaacatttcaaagctgatttctccatcagcttatgggatccttgtctttactgacaagaatggaatagaaatgtaaaagtactctgaaaagcaattgccctgtaacttatctagaaagaaaagaccctgagactccagaatctgctgttgccatagccccatatgtgtgaattctgcaactagccaaggctagttcctttcaattccatttaaaaaacaaaaaccagcaggtgtggtggctcatggcgtaatgggcctgcccaatgctttgggaggccaaggcagrtagatcgcttgagcccaggagtttgagacaagccctggcaacatagtgagatcccatttctacaaaaaaaaaaaaaaaattagccg

SEQ ID NO: 185 - DNA, 2917 bp, Homo sapiens
gccacagtggtgcggccggcggccgagcgttctgagtcacccgggactggagggccttcttcctgtgtggaaatacagygcctccggcttgaacctgccactcaggtgtcttgatgtgtcgggggtgtggctgcctgccccctgatgctccctgccccaccctgtgcagtaggaacccagccatggtgaacgaagccwgaggaaacagcagcctcaacccctgcttggagggcagtgccagcagtggcagtgagagctccaaagatagttcgagatgttccaccccgggcctggacccygagcggcatgagagactccgggagaagatgaggcsgcrattggaatctggtgacaagtggttctccctggaattcttccctcctcraactgctgagggagctgtcaatctcatctcaaggtttgaccggatggcagcaggtggccccctctacatagacgtgacctggcacccagcaggtgaccctggctcagacaaggagacctcctccatgatgatcgccagcacmrccgtgaactactgtggcctggagaccatcctgcacatgacctgctgccgtcagcgcctggaggagatcacrggccatctgcacaaagctaagcagctgggcctgaagaacatcatggcgctgcrgggagacccaataggtgaccagtgggaagaggaggagggaggcttcaactacgcagtggacctggtgaagcacatcygaagtgagtttggtgactactttgacatctgtgtggcaggttaccccaaaggccaccccgaagcagggagctttgaggctgacctgaagcacttgaaggagaaggtgtctgcgggagycgatttcatcaycaygcagcttttctttgaggctgacacattyttccgctttgtgaaggcatgcaccgacatgggcatcacttgccccatcgtccccgggatctttcccatccagggctaccactcccttcggcagcttgtgaagctgtccaagctggaggtgccacaggagatcaaggacgtgattgagccaatcaaagacaacgatgctgccatccgcaactatggcatcgagctggccgtgagcctgtgccaggagcttctggccagtggcttggtgccaggcctccacttctacacccycarcygcgagatggctaccacagaggtgctgaagcgcctggggatgtggactgaggaccccaggcgtcccctaccctgggctctcagygcccaccccaagygcygagaggaagatgtacgtcccatcttctgggcctccagaccaaagagttasatctaccgtacccaggagtgggacgagttccctaacgrccgctggggcaattcctcttcccctgcctttggggagctgaaggactactacctcttctacctgaagagcaagtcccccaaggaggagctgctgaagatgtggggggakgagctgaccagtgaagmaagtgtctttgaagtcttygttctttacctctcgggagaaccaaaccggaatggtcacaaagtgacttgcctgccctggaacgatgagcccctggcggctgagaccagcctgctgaaggaggagctgctgcgggtgaaccgccagggcatcctcaccatcaactcacagcccaacatcaacgggaagccrtcctccgaccccatcgtgggctggggccccagcgggggctatgtcttccagaaggcctacttagagtttttcacttcccgcgagacagcggaagcacttctgcaagtgctgaagaagtacgagctccgggttaattaccaccttgtcaatgtgaagggtgaaaacatcaccaatgcccctgaactgcagccgaatgctgtcacttggggcatcttccctgrgygagagatcatccagcccaccgtagtggatcccgtcagcttcatgttctggwaggacraggcctttgccctgtggattgagcrgtggggaaagctgtatgaggaggagtccccgtcccgcaccatcatccagtacatccacgacaactacttcctggtcaacctggtggacaatgacttcccactggacaactgcctctggcaggtggtggaagacacattggagcttctcaacaggcccacccagaatgcgagagaaayggaggctccatgaccctgcgtcctgacgccctgcgttggagccactcctgtcccgccttcctcctccacagtgctgcttctcttgggaactccactctccttcgtgtctctcccaccccggcctccactcccccacctgacaatggcagctagactggagtgaggcttccaggctcttcctggacctgagtcggccccacatgggaacctagtactctctgctctagccaggagtctgtgctcttttggtggggagcacttgcgtcctgcagaggaccacagtgggtggcacctcctgagaaggcgaggagagtggttgttgccaactaagccctcgaaccaaggcagcctccagagccagcctgggactcccagtgaacttacmcttggagcccgtgcagtacaggcaaaacacgcaagggcatcaggcactggtggcatcgtagaagagatgtggcaaagtgctgtacccttccacctcctagaggtgggcagctgggccccacctacttgtgactgaaggggcacaccactgccctgcctgcccacttagccgtccatggcaccagccccctggatgggcattgggctgacacctaccatgctgctttttggcacagttgtctattctgagccttgagagaaaaagtgccccttaagggttgaaggcagtctgaacccttgtgcttggtggggctcgtggccttccccttttgcctggctgtggaggcctgatgctgccccgttccctgtcagaggctaagatgagatttgcca

SEQ ID NO: 186 - DNA, 2745 bp, Homo sapiens
gaacccagccatggtgaacgaagccwgaggaaacagcagcctcaacccctgcttggagggcagtgccagcagtggcagtgagagctccaaagatagttcgagatgttccaccccgggcctggacccygagcggcatgagagactccgggagaagatgaggcsgcrattggaatctggtgacaagtggttctccctggaattcttccctcctcraactgctgagggagctgtcaatctcatctcaaggtttgaccggatggcagcaggtggccccctctacatagacgtgacctggcacccagcaggtgaccctggctcagacaaggagacctcctccatgatgatcgccagcacmrccgtgaactactgtggcctggagaccatcctgcacatgacctgctgccgtcagcgcctggaggagatcacrggccatctgcacaaagctaagcagctgggcctgaagaacatcatggcgctgcrgggagacccaataggtgaccagtgggaagaggaggagggaggcttcaactacgcagtggacctggtgaagcacatcygaagtgagtttggtgactactttgacatctgtgtggcaggttaccccaaaggccaccccgaagcagggagctttgaggctgacctgaagcacttgaaggagaaggtgtctgcgggagycgatttcatcaycaygcagcttttctttgaggctgacacattyttccgctttgtgaaggcatgcaccgacatgggcatcacttgccccatcgtccccgggatctttcccatccagggctaccactcccttcggcagcttgtgaagctgtccaagctggaggtgccacaggagatcaaggacgtgattgagccaatcaaagacaacgatgctgccatccgcaactatggcatcgagctggccgtgagcctgtgccaggagcttctggccagtggcttggtgccaggcctccacttctacacccycarcygcgagatggctaccacagaggtgctgaagcgcctggggatgtggactgaggaccccaggcgtcccctaccctgggctctcagygcccaccccaagygcygagaggaagatgtacgtcccatcttctgggcctccagaccaaagagttasatctaccgtacccaggagtgggacgagttccctaacgrccgctggggcaattcctcttcccctgcctttggggagctgaaggactactacctcttctacctgaagagcaagtcccccaaggaggagctgctgaagatgtggggggakgagctgaccagtgaagmaagtgtctttgaagtcttygttctttacctctcgggagaaccaaaccggaatggtcacaaagtgacttgcctgccctggaacgatgagcccctggcggctgagaccagcctgctgaaggaggagctgctgcgggtgaaccgccagggcatcctcaccatcaactcacagcccaacatcaacgggaagccrtcctccgaccccatcgtgggctggggccccagcgggggctatgtcttccagaaggcctacttagagtttttcacttcccgcgagacagcggaagcacttctgcaagtgctgaagaagtacgagctccgggttaattaccaccttgtcaatgtgaagggtgaaaacatcaccaatgcccctgaactgcagccgaatgctgtcacttggggcatcttccctgrgygagagatcatccagcccaccgtagtggatcccgtcagcttcatgttctggwaggacraggcctttgccctgtggattgagcrgtggggaaagctgtatgaggaggagtccccgtcccgcaccatcatccagtacatccacgacaactacttcctggtcaacctggtggacaatgacttcccactggacaactgcctctggcaggtggtggaagacacattggagcttctcaacaggcccacccagaatgcgagagaaayggaggctccatgaccctgcgtcctgacgccctgcgttggagccactcctgtcccgccttcctcctccacagtgctgcttctcttgggaactccactctccttcgtgtctctcccaccccggcctccactcccccacctgacaatggcagctagactggagtgaggcttccaggctcttcctggacctgagtcggccccacatgggaacctagtactctctgctctagccaggagtctgtgctcttttggtggggagcacttgcgtcctgcagaggaccacagtgggtggcacctcctgagaaggcgaggagagtggttgttgccaactaagccctcgaaccaaggcagcctccagagccagcctgggactcccagtgaacttacmcttggagcccgtgcagtacaggcaaaacacgcaagggcatcaggcactggtggcatcgtagaagagatgtggcaaagtgctgtacccttccacctcctagaggtgggcagctgggccccacctacttgtgactgaaggggcacaccactgccctgcctgcccacttagccgtccatggcaccagccccctggatgggcattgggctgacacctaccatgctgctttttggcacagttgtctattctgagccttgagagaaaaagtgccccttaagggttgaaggcagtctgaacccttgtgcttggtggggctcgtggccttccccttttgcctggctgtggaggcctgatgctgccccgttccctgtcagaggctaagatgagatttgcca

SEQ ID NO: 187 - DNA, 3396 bp, Homo sapiens
gaccatcgaaaagccagggtcctcccagctgggcactactgcccctcgctaggaatatgggcctcgcaggtcggcagcgtgaggtcctctgtgccaccttccatcagtaggaacccagccatggtgaacgaagccwgaggaaacagcagcctcaacccctgcttggagggcagtgccagcagtggcagtgagagctccaaagatagttcgagatgttccaccccgggcctggacccygagcggcatgagagactccgggagaagatgaggcsgcrattggaatctggtgacaagtggttctccctggaattcttccctcctcraactgctgagggagctgtcaatctcatctcaaggtttgaccggatggcagcaggtggccccctctacatagacgtgacctggcacccagcaggtgaccctggctcagacaaggagacctcctccatgatgatcgccagcacmrccgtgaactactgtggcctggagaccatcctgcacatgacctgctgccgtcagcgcctggaggagatcacrggccatctgcacaaagctaagcagctgggcctgaagaacatcatggcgctgcrgggagacccaataggtgaccagtgggaagaggaggagggaggcttcaactacgcagtggacctggtgaagcacatcygaagtgagtttggtgactactttgacatctgtgtggcaggttaccccaaaggccaccccgaagcagggagctttgaggctgacctgaagcacttgaaggagaaggtgtctgcgggagycgatttcatcaycaygcagcttttctttgaggctgacacattyttccgctttgtgaaggcatgcaccgacatgggcatcacttgccccatcgtccccgggatctttcccatccagggctaccactcccttcggcagcttgtgaagctgtccaagctggaggtgccacaggagatcaaggacgtgattgagccaatcaaagacaacgatgctgccatccgcaactatggcatcgagctggccgtgagcctgtgccaggagcttctggccagtggcttggtgccaggcctccacttctacacccycarcygcgagatggctaccacagaggtgctgaagcgcctggggatgtggactgaggaccccaggcgtcccctaccctgggctctcagygcccaccccaagygcygagaggaagatgtacgtcccatcttctgggcctccagaccaaagagttasatctaccgtacccaggagtgggacgagttccctaacgrccgctggggcaattcctcttcccctgcctttggggagctgaaggactactacctcttctacctgaagagcaagtcccccaaggaggagctgctgaagatgtggggggakgagctgaccagtgaagmaagtgtctttgaagtcttygttctttacctctcgggagaaccaaaccggaatggtcacaaagtgacttgcctgccctggaacgatgagcccctggcggctgagaccagcctgctgaaggaggagctgctgcgggtgaaccgccagggcatcctcaccatcaactcacagcccaacatcaacgggaagccrtcctccgaccccatcgtgggctggggccccagcgggggctatgtcttccagaaggcctacttagagtttttcacttcccgcgagacagcggaagcacttctgcaagtgctgaagaagtacgagctccgggttaattaccaccttgtcaatgtgaagggtgaaaacatcaccaatgcccctgaactgcagccgaatgctgtcacttggggcatcttccctgrgygagagatcatccagcccaccgtagtggatcccgtcagcttcatgttctggwaggacraggcctttgccctgtggattgagcrgtggggaaagctgtatgaggaggagtccccgtcccgcaccatcatccagtacatccacgacaactacttcctggtcaacctggtggacaatgacttcccactggacaactgcctctggcaggtggtggaagacacattggagcttctcaacaggcccacccagaatgcgagagaaayggaggctccatgaccctgcgtcctgacgccctgcgttggagccactcctgtcccgccttcctcctccacagtgctgcttctcttgggaactccactctccttcgtgtctctcccaccccggcctccactcccccacctgacaatggcagctagactggagtgaggcttccaggctcttcctggacctgagtcggccccacatgggaacctagtactctctgctctagccaggagtctgtgctcttttggtggggagcacttgcgtcctgcagaggaccacagtgggtggcacctcctgagaaggcgaggagagtggttgttgccaactaagccctcgaaccaaggcagcctccagagccagcctgggactcccagtgaacttacmcttggagcccgtgcagtacaggcaaaacacgcaagggcatcaggcactggtggcatcgtagaagagatgtggcaaagtgctgtacccttccacctcctagaggtgggcagctgggccccacctacttgtgactgaaggggcacaccactgccctgcctgcccacttagccgtccatggcaccagccccctggatgggcattgggctgacacctaccatgctgctttttggcacagttgtctattctgagccttgagagaaaaagtgccccttaagggttgaaggcagtctgaacccttgtgcttggtggggctcgtggccttccccttttgcctggctgtggaggcctgatgctgccccgttccctgtcagaggctaagatgagatttgccactgggatttcttcgctgctctagctggcaggacacatcccggcctcttcttccacccattcccccatgtggctgaagacattccaacaatggggtgggcccataatagttagccctcagtcagttcccggagcacagccctgggagggggctatttctctccccactgaaaacatttcaaagctgatttctccatcagcttatgggatccttgtctttactgacaagaatggaatagaaatgtaaaagtactctgaaaagcaattgccctgtaacttatctagaaagaaaagaccctgagactccagaatctgctgttgccatagccccatatgtgtgaattctgcaactagccaaggctagttcctttcaattccatttaaaaaacaaaaaccagcaggtgtggtggctcatggcgtaatgggcctgcccaatgctttgggaggccaaggcagrtagatcgcttgagcccaggagtttgagacaagccctggcaacatagtgagatcccatttctacaaaaaaaaaaaaaaaattagccg

SEQ ID NO: 188 - DNA, 2842 bp, Homo sapiens
cacctgcgccgcgccccttcactgcgttccccgcccctgcagcggccacagtggtgcggccggcggccgagcgttctgagtcacccgggactggagggaacccagccatggtgaacgaagccwgaggaaacagcagcctcaacccctgcttggagggcagtgccagcagtggcagtgagagctccaaagatagttcgagatgttccaccccgggcctggacccygagcggcatgagagactccgggagaagatgaggcsgcrattggaatctggtgacaagtggttctccctggaattcttccctcctcraactgctgagggagctgtcaatctcatctcaaggtttgaccggatggcagcaggtggccccctctacatagacgtgacctggcacccagcaggtgaccctggctcagacaaggagacctcctccatgatgatcgccagcacmrccgtgaactactgtggcctggagaccatcctgcacatgacctgctgccgtcagcgcctggaggagatcacrggccatctgcacaaagctaagcagctgggcctgaagaacatcatggcgctgcrgggagacccaataggtgaccagtgggaagaggaggagggaggcttcaactacgcagtggacctggtgaagcacatcygaagtgagtttggtgactactttgacatctgtgtggcaggttaccccaaaggccaccccgaagcagggagctttgaggctgacctgaagcacttgaaggagaaggtgtctgcgggagycgatttcatcaycaygcagcttttctttgaggctgacacattyttccgctttgtgaaggcatgcaccgacatgggcatcacttgccccatcgtccccgggatctttcccatccagggctaccactcccttcggcagcttgtgaagctgtccaagctggaggtgccacaggagatcaaggacgtgattgagccaatcaaagacaacgatgctgccatccgcaactatggcatcgagctggccgtgagcctgtgccaggagcttctggccagtggcttggtgccaggcctccacttctacacccycarcygcgagatggctaccacagaggtgctgaagcgcctggggatgtggactgaggaccccaggcgtcccctaccctgggctctcagygcccaccccaagygcygagaggaagatgtacgtcccatcttctgggcctccagaccaaagagttasatctaccgtacccaggagtgggacgagttccctaacgrccgctggggcaattcctcttcccctgcctttggggagctgaaggactactacctcttctacctgaagagcaagtcccccaaggaggagctgctgaagatgtggggggakgagctgaccagtgaagmaagtgtctttgaagtcttygttctttacctctcgggagaaccaaaccggaatggtcacaaagtgacttgcctgccctggaacgatgagcccctggcggctgagaccagcctgctgaaggaggagctgctgcgggtgaaccgccagggcatcctcaccatcaactcacagcccaacatcaacgggaagccrtcctccgaccccatcgtgggctggggccccagcgggggctatgtcttccagaaggcctacttagagtttttcacttcccgcgagacagcggaagcacttctgcaagtgctgaagaagtacgagctccgggttaattaccaccttgtcaatgtgaagggtgaaaacatcaccaatgcccctgaactgcagccgaatgctgtcacttggggcatcttccctgrgygagagatcatccagcccaccgtagtggatcccgtcagcttcatgttctggwaggacraggcctttgccctgtggattgagcrgtggggaaagctgtatgaggaggagtccccgtcccgcaccatcatccagtacatccacgacaactacttcctggtcaacctggtggacaatgacttcccactggacaactgcctctggcaggtggtggaagacacattggagcttctcaacaggcccacccagaatgcgagagaaayggaggctccatgaccctgcgtcctgacgccctgcgttggagccactcctgtcccgccttcctcctccacagtgctgcttctcttgggaactccactctccttcgtgtctctcccaccccggcctccactcccccacctgacaatggcagctagactggagtgaggcttccaggctcttcctggacctgagtcggccccacatgggaacctagtactctctgctctagccaggagtctgtgctcttttggtggggagcacttgcgtcctgcagaggaccacagtgggtggcacctcctgagaaggcgaggagagtggttgttgccaactaagccctcgaaccaaggcagcctccagagccagcctgggactcccagtgaacttacmcttggagcccgtgcagtacaggcaaaacacgcaagggcatcaggcactggtggcatcgtagaagagatgtggcaaagtgctgtacccttccacctcctagaggtgggcagctgggccccacctacttgtgactgaaggggcacaccactgccctgcctgcccacttagccgtccatggcaccagccccctggatgggcattgggctgacacctaccatgctgctttttggcacagttgtctattctgagccttgagagaaaaagtgccccttaagggttgaaggcagtctgaacccttgtgcttggtggggctcgtggccttccccttttgcctggctgtggaggcctgatgctgccccgttccctgtcagaggctaagatgagatttgcca

SEQ ID NO: 189 - DNA, 2867 bp, Homo sapiens
cgagcgagggcgccgcttttgcgtccgggaggagccaaccgtggcgcaggcggcgcggggaggcgtcccagaggatcatgggagaccacctggaccttctcctaggagtggtgctcatggccggtcctgtgtttggaattccttcctgctcctttgatggccgaatagccttttatcgtttctgcaacctcacccaggtcccccaggtcctcaacaccactgagaggctcctgctgagcttcaactatatcaggacagtyactgcttcatccttcccctttctggaacagctgcagctgctggagctcgggagccagtatayccccttgactattgacaaggaggccttcagaaacctgcccaaccttagaatcttggacctgggaagtagtaagatatacttcttgcatscagatgcttttcagggactgttccatctgtttgaacttagactgtatttctgtggtctytctgatgctgtattgaaagatggttatttcagaaatttaaaggctttaactcgcttggatctatccaaaaatcagattcgtagcctttaccttcatccttcatttgggaagttgaattccttaaagtccatagatttttcctccaacmaaatattccttgtatgtgaacatgagctcgagcccctacaagggaaaacgctctcctttyttagcctcgcagctaatagcttgtatagcagagtctcagtggactggggaaaatgtatgaacccattcagaaacatggtgctggagatactagatgtttctggaaatggctggacagtggacatcacaggaaactttagcaatgccatcagcaaaagccaggccttctctttgattcttgcccaccacatcatgggtgccgggtttggcttccataacatcaaagatcctgaccagaacacatttgctggcctggccagaagttcagtgagacacctggatctttcacatgggtttgtcttctccctgaactcacgagtctttgagacactcaaggatttgaaggttctgaaccttgcctacaacaagataaataagattgcagatgaagcattttacggacttgacaacctccaagttctcaatttgtcatataaccttctgggggaactttacagttcgaatttctatggactacctaaggtagcctacattgatttgcaaaagaatcacattgcaataattcaagaccaaacattcaaattcctggaaaaattacagaccttggatctcygagacaatgctcttacaaccattcattttattccaagcatacccgatatcttcttgagtggcaataaactagtgactttgccaaagatcaaccttacagcgaacctcatccacttatcagaaaacaggctagaaaatctagatattctctactttctyctacgggtacctcatctccagattctcattttaaatcaaaatcgcttctcctcctgtagtggagatcaaaccccttcagagaatcccagcttagaacagcttttccttggagaaaatatgttgcaacttgcctgggaaactgagctctgttgggatgtttttgagggactttctcatcttcaagttctgtatttgaatcataactatcttaattcccttccaccaggagtatttagccatctgactgcattaaggggactaagcctcaactccaacaggctgacagttctttctcacaatgatttacctgctaatttagagatcctggacatatccaggaaccagctcctagctcctaatcctgatgtatttgtatcacttagtgtcttggatataactcataacaagttcatttgtgaatgtgaacttagcacttttatcarttggcttaatcacaccaatgtcactatagctgggcctcctgcagacatatattgtgtgtaccctgactcgytctctggggtttccctcttctctctttccacggaaggttgtgatgaagaggaagtcttaaagtccctaaagttctcccttttcattgtatgcactgtcactctgactctgttcctcatgaccatcctcacagtcacaaagttccggggcttctgttttatctgttataagacagcccagagactggtgttcaaggaccatccccagggcacagaacctgatatgtacaaatatgatgcctatttgtgcttcagcagcaaagacttcacatgggtgcagaatgctttgctcaaacacctggacactcaatacagtgaccaaaacagattcaacctgtgctttgaagaaagagactttgtcccaggagaaaaccgcattgccaatatccaggatgccatctggaacagtagaaagatcgtttgtcttgtgagcagacacttccttagagatggctggtgccttgaagccttcagttatgcccagggcaggtgcttatctgaccttaacagtgctctcatcatggtggtggttgggtccttgtcccagtaccagttgatgaaacatcaatccatcagaggctttgtacagaaacagcagtatttgaggtggcctgaggatctccaggatgttggctggtttcttcataaactctctcaacagatactaaagaaagaaaargaaaagaagaaagacaataacattccgttgcaaactgtagcaaccatctcctaatcaaaggagcaatttccaacttatctcaagccacaaataactcttcactttgtatttgcaccaagttatcattttggggtcctctctggaggttttttttttctttttgctactatgaaaacaacataaatctctcaattttcgtatcaacaccatgttctgtctcactaacctccaaatggaaaataatagatctagaaaattgcaactgcc

SEQ ID NO: 190 - DNA, 3431 bp, Homo sapiens
ggttttcaggakcccgagcgagggcgccgcttttgcgtccgggaggagccaaccgtggcgcaggcggcgcggggaggcgtcccagagtctcactctgccgcccaggctggactgcagtgacacaatctcggctgactgcaaccactgcctccagggttcaagcgattctcttgcctcagcctcccaagtagctgggattacagattgatgttcatgttcctgacactactacaagattcatactcctgatgctactgacaacgtggcttctccacagtcaccaaaccagggatgctatactggacttccctactctcatctgctccagccccctgaccttatagttgcccagctttcctggcaattgactttgcccatcaatacacaggatttagcatccagggaagatgtcggagcctcagatgttaattttctaattgagaatgttggcgctgtccgaacctggagacaggaaaacaaaaagtcctttctcctgattcaccaaaaaataaaatactgactaccatcactgtgatgwgattcctatagtctcaggaactgaagtctttaaacaaccagggaccctctgcccctagaataagaacatactagaagtcccttctgctaggacaacgaggatcatgggagaccacctggaccttctcctaggagtggtgctcatggccggtcctgtgtttggaattccttcctgctcctttgatggccgaatagccttttatcgtttctgcaacctcacccaggtcccccaggtcctcaacaccactgagaggctcctgctgagcttcaactatatcaggacagtyactgcttcatccttcccctttctggaacagctgcagctgctggagctcgggagccagtatayccccttgactattgacaaggaggccttcagaaacctgcccaaccttagaatcttggacctgggaagtagtaagatatacttcttgcatscagatgcttttcagggactgttccatctgtttgaacttagactgtatttctgtggtctytctgatgctgtattgaaagatggttatttcagaaatttaaaggctttaactcgcttggatctatccaaaaatcagattcgtagcctttaccttcatccttcatttgggaagttgaattccttaaagtccatagatttttcctccaacmaaatattccttgtatgtgaacatgagctcgagcccctacaagggaaaacgctctcctttyttagcctcgcagctaatagcttgtatagcagagtctcagtggactggggaaaatgtatgaacccattcagaaacatggtgctggagatactagatgtttctggaaatggctggacagtggacatcacaggaaactttagcaatgccatcagcaaaagccaggccttctctttgattcttgcccaccacatcatgggtgccgggtttggcttccataacatcaaagatcctgaccagaacacatttgctggcctggccagaagttcagtgagacacctggatctttcacatgggtttgtcttctccctgaactcacgagtctttgagacactcaaggatttgaaggttctgaaccttgcctacaacaagataaataagattgcagatgaagcattttacggacttgacaacctccaagttctcaatttgtcatataaccttctgggggaactttacagttcgaatttctatggactacctaaggtagcctacattgatttgcaaaagaatcacattgcaataattcaagaccaaacattcaaattcctggaaaaattacagaccttggatctcygagacaatgctcttacaaccattcattttattccaagcatacccgatatcttcttgagtggcaataaactagtgactttgccaaagatcaaccttacagcgaacctcatccacttatcagaaaacaggctagaaaatctagatattctctactttctyctacgggtacctcatctccagattctcattttaaatcaaaatcgcttctcctcctgtagtggagatcaaaccccttcagagaatcccagcttagaacagcttttccttggagaaaatatgttgcaacttgcctgggaaactgagctctgttgggatgtttttgagggactttctcatcttcaagttctgtatttgaatcataactatcttaattcccttccaccaggagtatttagccatctgactgcattaaggggactaagcctcaactccaacaggctgacagttctttctcacaatgatttacctgctaatttagagatcctggacatatccaggaaccagctcctagctcctaatcctgatgtatttgtatcacttagtgtcttggatataactcataacaagttcatttgtgaatgtgaacttagcacttttatcarttggcttaatcacaccaatgtcactatagctgggcctcctgcagacatatattgtgtgtaccctgactcgytctctggggtttccctcttctctctttccacggaaggttgtgatgaagaggaagtcttaaagtccctaaagttctcccttttcattgtatgcactgtcactctgactctgttcctcatgaccatcctcacagtcacaaagttccggggcttctgttttatctgttataagacagcccagagactggtgttcaaggaccatccccagggcacagaacctgatatgtacaaatatgatgcctatttgtgcttcagcagcaaagacttcacatgggtgcagaatgctttgctcaaacacctggacactcaatacagtgaccaaaacagattcaacctgtgctttgaagaaagagactttgtcccaggagaaaaccgcattgccaatatccaggatgccatctggaacagtagaaagatcgtttgtcttgtgagcagacacttccttagagatggctggtgccttgaagccttcagttatgcccagggcaggtgcttatctgaccttaacagtgctctcatcatggtggtggttgggtccttgtcccagtaccagttgatgaaacatcaatccatcagaggctttgtacagaaacagcagtatttgaggtggcctgaggatctccaggatgttggctggtttcttcataaactctctcaacagatactaaagaaagaaaargaaaagaagaaagacaataacattccgttgcaaactgtagcaaccatctcctaatcaaaggagcaatttccaacttatctcaagccacaaataactcttcactttgtatttgcaccaagttatcattttggggtcctctctggaggttttttttttctttttgctactatgaaaacaacataaatctctcaattttcgtatcaacaccatgttctgtctcactaacctccaaatggaaaataatagatctagaaaattgcaactgcc

SEQ ID NO: 191 - DNA, 4101 bp, Homo sapiens
  misc_feature (1)...(4101): n = A,T,C or G, or insertion/deletion polymorphism (see Tables 1-2)
ggctgctctcgctgccgctccccccggcgaactagcatgaaatctccctgcctctgccgagatcaaatggagcttctcgctgatggggtgcgagtattacctccgccatgcaatttccactatcaataatttaacttctttgctgcagaacagaaggagtacataccgggcaccaaagactcgcgccccctcccccctttaattaagcgaagggaacgtgaaaaaataatagagtgtgggagttttggggccgaagtctttcccggagcagctgccttgatggttactttgacaagtagtgactgaaaagagcagagatrattaaaaattaaacttacaaagctgctanagtgggaagaaggagaacttgaagccacaatttttgcacttgcttagaagccatctaatctcagttccaccaggtgagaagagtgatgaccatccttttccttactatggttatttcatactttggttgcatgaaggctgcccccatgbaagaabcaaacatccgaggacaaggtggcttggcctacccaggtgtgcggacccatgggactctggagagcgtgartgggcccaaggcaggttcaagaggcttgacatcattggctgacactttcgaacacgtgatagaagagctgttggatgaggaccagaaagttcggcccaatgaagaaaacaataaggacgcagacttgtacacgtccagggtgatgctcagtagtcaagtgcctttggagcctcctcttctctttctgctggaggaatacaaaaattacctagatgctgcaaacatgtccatgagggtccggcgccactctgaccctgcccgccgaggggagctgagcgtgtgtgacagtattagtgagtgggtaacggcggcagacaaaaagactgcagtggacatgtcgggcgggacggtcacagtccttgaaaaggtccctgtatcaaaaggccaactgaagcaatacttctacgagaccaagtgcaatcccatgggttacacaaaagaaggctgcaggggcatagacaaaaggcattggaactcccagtgccgaactacccagtcgtacgtgcgggcccttaccatggatagcaaaaagagaattggctggcgattcataaggatagacacttcttgtgtatgtacattgaccmttaaaaggggaagatagtggatttatgttgtatagattagattatattgagacaaaaattamctatttgtatatatacataacagggtaaattattcagttaagaaaaaaataattttatgaactgcatgtataaatgaagtttatacagtacagtggttctacaatctatttattggacatgtccatgaccagaagggaaacagtcatttgcgcacaacttaaaaagtctgcattacattccttgataatgttgtggtttgttgccgttgccaagaactgaaaacataaaaagttaaaaaaaataataaattgcatgctgctttaattgtgaattgataataaactgtcctctttcagaaaacagaaaaaaacacacacacacacaacaaaaatttgaaccaaaacattccgtttacattttagacagtaagtatcttcgttcttgttagtactatatctgttttactgcttttaacttctgatagcgttggaattaaaacaatgtcaaggtgctgttgtcattgctttactggcttaggggatgggggatggggggtatatttttgtttgttttgtgtttttttttcgtttgtttgttttgttttttagttcccacagggagtagagatggggaaagaattcctacaatatatattctggctgataaaagatacatttgtatgttgtgaagatgtttgcaatatcgatcagatgactagaaagtgaataaaaattaaggcaactgaacaaaaaaatgctcacactccacatcccgtgatgcacctcccaggccccgctcattctttgggcgttggtcagagtaagctgcttttgacggaaggacctatgtttgctcagaacacattctttccccccctccccctctggtctcctctttgttttgttttaaggaagaaaaatcagttgcgcgttctgaaatattttaccactgctgtgaacaagtgaacacattgtgtcacatcatgacactcgtataagcatggagaacagtgatttttttttagaacagaaaacaacaaaaaataaccccaaaatgaagattattttttatgaggagtgaacatttgggtaaatcatggctaagcttaaaaaaaactcatggtgaggcttaacaatgtcttgtaagcaaaaggtagagccctgtatcaacccagaaacacctagatcagaacaggaatccacattgccagtgacatgagactgaacagccaaatggaggctatgtggagttggcattgcatttaccggcagtgcgggaggaatttctgagtggccatcccaaggtctaggtggaggtggggcatggtatttgagacattccaaaacgaaggcctctgaaggacccttcagaggtggctctggaatgacatgtgtcaagctgcttggacctcgtgctttaagtgcctacattatctaactgtgctcaagaggttctcgactggaggaccacactcaagccgacttatgcccaccatcccacctctggataattttgcataaaattggattagcctggagcaggttgggagccaaatgtggcatttgtgatcatgagattgatgcaatgagatagaagatgtttgctacctgaacacttattgctttgaaactagacttgaggaaaccagggtttatcttttgagaacttttggtaagggaaaagggaacaggaaaagaaaccccaaactcaggccgaatgatcaaggggacccataggaaatcttgtccagagacaagacttcgggaaggtgtctggacattcagaacaccaagacttgaaggtgccttgctcaatggaagaggccaggacagagctgacaaaattttgctccccagtgaaggccacagcaaccttctgcccatcctgtctgttcatggagagggtccctgcctcacctctgccattttgggttaggagaagtcaagttgggagcctgaaatagtggttcttggaaaaatggatccccagtgaaaactagagctctaagcccattcagcccatttcacacctgaaaatgttagtgatcaccacttggaccagcatccttaagtatcagaaagccccaagcaattgctgcatcttagtagggtgagggataagcaaaagaggatgttcaccataacccaggaatgaagataccatcagcaaagaatttcaatttgttcagtctttcatttagagctagtctttcacagtaccatctgaatacctctttgaaagaaggaagactttacgtagtgtagatttgttttgtgttgtttgaaaatattatctttgtaattatttttaatatgtaaggaatgcttggaatatctgctatatgtcaactttatgcagcttccttttgagggacaaatttaaaacaaacaaccccccatcacaaacttaaaggattgcaagggccagatctgttaagtggtttcataggagacacatccagcaattgtgtggtcagtggctcttttacccaataagatacatcacagtcacatgcttgatggtttatgttgacctaagatttattttgttaaaatctctctctgttgtgttcgttcttgttctgttttgttttgttttttaaagtcttgctgtggtctctttgtggcagaagtgtttcatgcatggcagcaggcctgttgcttttttatggcgattcccattgaaaatgtaagtaaatgtctgtggccttgttctctctatggtaaagatattattcaccatgtaaaacaaaaaacaatatttattgtattttagtatatttatataattatgttattgaaaaaaattggcattaaaacttaaccgcatcagaagcctattgtaaatacaagttctatttaagtgtactaattaacatataatatatgttttaaatatagaatttttaatgtttttaaatatattttcaaagtacat

SEQ ID NO: 192 - DNA, 3957 bp, Homo sapiens
  misc_feature (1)...(3957): n = A,T,C or G, or insertion/deletion polymorphism (see Tables 1-2)
gccgctgccgccgccgcgcccgggcgcacccgcccgctcgctgtcccgcgcaccccgtagcgcctcgggctcccgggccggacagaggagccagcccggtgcgcccctccacctcctgctcggggggctttaatgagacacccaccgctgctgtggggccggcggggagcagcaccgcgacggggaccggggctgggcgctggagccagaatcggaaccacgatgtgactccgccgccggggacccgtgaggtttgtgtggaccccgagttccaccaggtgagaagagtgatgaccatccttttccttactatggttatttcatactttggttgcatgaaggctgcccccatgaaagaagcaaacatccgaggacaaggtggcttggcctacccaggtgtgcggacccatgggactctggagagcgtgaatgggcccaaggcaggttcaagaggcttgacatcattggctgacactttcgaacacrtgatagaagagctgttggatgaggaccanaaagttcggcccaatgaagaaaacaataaggacgcagacttgtacacgtccagggtgatgctcagtagtcaagtgcctttggagcctcctcttctctttctgctggaggaatacaaaaattacctagatgctgcaaacatgtccatgabggtccbgcgccactctgaccctgcccgccgaggggagctgagcgtgtgtgacagtattagtgagtgggtaacggcrgcagacaaaaagactgcagtggacatgtcgggcgggacggtcacagtccttgaaaaggtccctgtatcaaaaggccaactgaagcaatacttctacgagaccaagtgcaatcccatgggttacacaaaagaaggctgcaggggcatagacaaaaggcattggaactcccagtgccgaactacccagtcgtacgtgcgggcccttaccatggatagcaaaaagagaattggctggcgattcataaggatagacacttcttgtgtatgtacattgaccattaaaaggggaagatagtggatttatgttgtatagattagattatattgagacaaaaattatctatttgtatatatacataacagggtaaattattcagttaagaaaaaaataattttatgaactgcatgtataaatgaagtttatacagtacagtggttctacaatctatttattggacatgtccatgaccagaagggaaacagtcatttgcgcacaacttaaaaagtctgcattacattccttgataatgttgtggtttgttgccgttgccaagaactgaaaacataaaaagttaaaaaaaataatamattgcatgctgctttaattgtgaattgataataaactgtcctctttcagaaaacagaaaaamacacacacacacacaacaaaaatttgaaccaaaacattccgtttacattttagacagtaagtatcttcgttcttgttagtactatatctgttttactgcttttaacttctgatagcgttggaattaaaacaatgtcaaggtgctgttgtcattgctttactggcttaggggatgggggatggggggtatatttttgtttgttttgtgtttttttttcgtttgtttgttttgttttttagttcccacagggagtagagatggggaaagaattcctacaatatatattctggctgataaaagatacatttgtatgttgtgaagatgtttgcaatatcgatcagatgactagaaagtgaataaaaattaaggcaactgaacaaaaaaatgctcacactccacatcccgtgatgcacctcccaggccccgctcattctttgggcgttggtcagagtaagctgcttttgacggaaggacctatgtttgctcagaacacattctttccccccctccccctctggtctcctctttgttttgttttaaggaagaaaaatcagttgcgcgttctgaaatattttaccactgctgtgaacaagtgaacacattgtgtcacatcatgacactcgtataagcatggagaacagtgatttttttttagaacagaaaacaacaaaaaataaccccaaaatgaagattattttttatgaggagtgaacatttgggtaaatcatggctaagcttaaaaaaaactcatggtgaggcttaacaatgtcttgtaagcaaaaggtagagccctgtatcaacccagaaacacctagatcagaacaggaatccacattgccagtgacatgagactgaacagccaaatggaggctatgtggagttggcattgcatttaccggcagtgcgggaggaatttctgagtggccatcccaaggtctaggtggaggtggggcatggtatttgagacattccaaaacgaaggcctctgaaggacccttcagaggtggctctggaatgacatgtgtcaagctgcttggacctcgtgctttaagtgcctacattatctaactgtgctcaagaggttctcgactggaggaccacactcaagccgacttatgcccaccatcccacctctggataattttgcataaaattggattagcctggagcaggttgggagccaaatgtggcatttgtgatcatgagattgatgcaatgagatagaagatgtttgctacctgaacacttattgctttgaaactagacttgaggaaaccagggtttatcttttgagaacttttggtaagggaaaagggaacaggaaaagaaaccccaaactcaggccgaatgatcaaggggacccataggaaatcttgtccagagacaagacttcgggaaggtgtctggacattcagaacaccaagacttgaaggtgccttgctcaatggaagaggccaggacagagctgacaaaattttgctccccagtgaaggccacagcaaccttctgcccatcctgtctgttcatggagagggtccctgcctcacctctgccattttgggttaggagaagtcaagttgggagcctgaaatagtggttcttggaaaaatggatccccagtgaaaactagagctctaagcccattcagcccatttcacacctgaaaatgttagtgatcaccacttggaccagcatccttaagtatcagaaagccccaagcaattgctgcatcttagtagggtgagggataagcaaaagaggatgttcaccataacccaggaatgaagataccatcagcaaagaatttcaatttgttcagtctttcatttagagctagtctttcacagtaccatctgaatacctctttgaaagaaggaagactttacgtagtgtagatttgttttgtgttgtttgaaaatattatctttgtaattatttttaatatgtaaggaatgcttggaatatctgctatatgtcaactttatgcagcttccttttgagggacaaatttaaaacaaacaaccccccatcacaaacttaaaggattgcaagggccagatctgttaagtggtttcataggagacacatccagcaattgtgtggtcagtggctcttttacccaataagatacatcacagtcacatgcttgatggtttatgttgacctaagatttattttgttaaaatctctctctgttgtgttcgttcttgttctgttttgttttgttttttaaagtcttgctgtggtctctttgtggcagaagtgtttcatgcatggcagcaggcctgttgcttttttatggcgattcccattgaaaatgtaagtaaatgtctgtggccttgttctctctatggtaaagatattattcaccatgtaaaacaaaaaacaatatttattgtattttagtatatttatataattatgttattgaaaaaaattggcattaaaacttaaccgcatcagaagcctattgtaaatacaagttctatttaagtgtactaattaacatataatatatgttttaaatatagaatttttaatgtttttaaatatattttcaaagtacat

SEQ ID NO: 193 - DNA, 4149 bp, Homo sapiens
  misc_feature (1)...(4149): n = A,T,C or G, or insertion/deletion polymorphism (see Tables 1-2)
aaggaagtggaagaaaccgtctagagcaatatcaagtatcacttaattagagatttttaagccttttcctcctgctgtgccgggtgtgtaatccgggcgataggagtccattcagcaccttggacagagccaacggatttgtccgaggtggcggtacccccaggtagtcttcttggccccgctgtaaagccaaccctgtgtcgcccttaaaaagcgtcttttctgaggttcggctcacactgagatcggggctggagagagagtcagattttggagcggagcgtttggaaagcgagccccagtttggtcccctcattgagctcgctgaagttggcttcctagcggtgtaggctggaatagactcttggcaagctccgggttggtatactgggttaactttgggaaatgcaagtgtttatctccaggatctagccaccggggtggtgtaagccgcaaagaagttccaccaggtgagaagagtgatgaccatccttttccttactatggttatttcatactttggttgcatgaaggctgcccccatgaaagaagcaaacatccgaggacaaggtggcttggcctacccaggtgtgcggacccatgggactctggagagcgtgaatgggcccaaggcaggttcaagaggcttgacatcattggctgacactttcgaacacrtgatagaagagctgttggatgaggaccanaaagttcggcccaatgaagaaaacaataaggacgcagacttgtacacgtccagggtgatgctcagtagtcaagtgcctttggagcctcctcttctctttctgctggaggaatacaaaaattacctagatgctgcaaacatgtccatgabggtccbgcgccactctgaccctgcccgccgaggggagctgagcgtgtgtgacagtattagtgagtgggtaacggcrgcagacaaaaagactgcagtggacatgtcgggcgggacggtcacagtccttgaaaaggtccctgtatcaaaaggccaactgaagcaatacttctacgagaccaagtgcaatcccatgggttacacaaaagaaggctgcaggggcatagacaaaaggcattggaactcccagtgccgaactacccagtcgtacgtgcgggcccttaccatggatagcaaaaagagaattggctggcgattcataaggatagacacttcttgtgtatgtacattgaccattaaaaggggaagatagtggatttatgttgtatagattagattatattgagacaaaaattatctatttgtatatatacataacagggtaaattattcagttaagaaaaaaataattttatgaactgcatgtataaatgaagtttatacagtacagtggttctacaatctatttattggacatgtccatgaccagaagggaaacagtcatttgcgcacaacttaaaaagtctgcattacattccttgataatgttgtggtttgttgccgttgccaagaactgaaaacataaaaagttaaaaaaaataatamattgcatgctgctttaattgtgaattgataataaactgtcctctttcagaaaacagaaaaamacacacacacacacaacaaaaatttgaaccaaaacattccgtttacattttagacagtaagtatcttcgttcttgttagtactatatctgttttactgcttttaacttctgatagcgttggaattaaaacaatgtcaaggtgctgttgtcattgctttactggcttaggggatgggggatggggggtatatttttgtttgttttgtgtttttttttcgtttgtttgttttgttttttagttcccacagggagtagagatggggaaagaattcctacaatatatattctggctgataaaagatacatttgtatgttgtgaagatgtttgcaatatcgatcagatgactagaaagtgaataaaaattaaggcaactgaacaaaaaaatgctcacactccacatcccgtgatgcacctcccaggccccgctcattctttgggcgttggtcagagtaagctgcttttgacggaaggacctatgtttgctcagaacacattctttccccccctccccctctggtctcctctttgttttgttttaaggaagaaaaatcagttgcgcgttctgaaatattttaccactgctgtgaacaagtgaacacattgtgtcacatcatgacactcgtataagcatggagaacagtgatttttttttagaacagaaaacaacaaaaaataaccccaaaatgaagattattttttatgaggagtgaacatttgggtaaatcatggctaagcttaaaaaaaactcatggtgaggcttaacaatgtcttgtaagcaaaaggtagagccctgtatcaacccagaaacacctagatcagaacaggaatccacattgccagtgacatgagactgaacagccaaatggaggctatgtggagttggcattgcatttaccggcagtgcgggaggaatttctgagtggccatcccaaggtctaggtggaggtggggcatggtatttgagacattccaaaacgaaggcctctgaaggacccttcagaggtggctctggaatgacatgtgtcaagctgcttggacctcgtgctttaagtgcctacattatctaactgtgctcaagaggttctcgactggaggaccacactcaagccgacttatgcccaccatcccacctctggataattttgcataaaattggattagcctggagcaggttgggagccaaatgtggcatttgtgatcatgagattgatgcaatgagatagaagatgtttgctacctgaacacttattgctttgaaactagacttgaggaaaccagggtttatcttttgagaacttttggtaagggaaaagggaacaggaaaagaaaccccaaactcaggccgaatgatcaaggggacccataggaaatcttgtccagagacaagacttcgggaaggtgtctggacattcagaacaccaagacttgaaggtgccttgctcaatggaagaggccaggacagagctgacaaaattttgctccccagtgaaggccacagcaaccttctgcccatcctgtctgttcatggagagggtccctgcctcacctctgccattttgggttaggagaagtcaagttgggagcctgaaatagtggttcttggaaaaatggatccccagtgaaaactagagctctaagcccattcagcccatttcacacctgaaaatgttagtgatcaccacttggaccagcatccttaagtatcagaaagccccaagcaattgctgcatcttagtagggtgagggataagcaaaagaggatgttcaccataacccaggaatgaagataccatcagcaaagaatttcaatttgttcagtctttcatttagagctagtctttcacagtaccatctgaatacctctttgaaagaaggaagactttacgtagtgtagatttgttttgtgttgtttgaaaatattatctttgtaattatttttaatatgtaaggaatgcttggaatatctgctatatgtcaactttatgcagcttccttttgagggacaaatttaaaacaaacaaccccccatcacaaacttaaaggattgcaagggccagatctgttaagtggtttcataggagacacatccagcaattgtgtggtcagtggctcttttacccaataagatacatcacagtcacatgcttgatggtttatgttgacctaagatttattttgttaaaatctctctctgttgtgttcgttcttgttctgttttgttttgttttttaaagtcttgctgtggtctctttgtggcagaagtgtttcatgcatggcagcaggcctgttgcttttttatggcgattcccattgaaaatgtaagtaaatgtctgtggccttgttctctctatggtaaagatattattcaccatgtaaaacaaaaaacaatatttattgtattttagtatatttatataattatgttattgaaaaaaattggcattaaaacttaaccgcatcagaagcctattgtaaatacaagttctatttaagtgtactaattaacatataatatatgttttaaatatagaatttttaatgtttttaaatatattttcaaagtacat

SEQ ID NO: 194 - DNA, 1505 bp, Homo sapiens
cgtggccctgtggcagccgagccatggtttctaaactgagcyagctgcagacggagcwcctggcggccctgctsgagtcarggctgagcaaagaggcactgmtccaggcactggrtgagccggggccctacctcctggctggagaaggccccctggacaaggrgragtcctgcggcggcggtcgaggggagctggctgagctgcccaatgggctgggggagactcggggctccgaggacgagacggacgacgatggggaagacttcacgccacccatcctcaaagagctggagaacctyagccctgaggaggcggyccaccagaaagccgtggtggagacccttctgcaggaggacccgtggcgtgtggcgaagatggtcaagtcctrcctgcagcagcacaacawcmcacagyrgragrtggtcgataccactggcctcaaccagtycyacctgtcccaacacctcaacaagggcactcccatgaagacgcagaakyrggccrccctgtacacctggtacgtccgcaagcagygagaggtggcgcagcagttcacccatgcagggcagggagggctgattgaagagcccacagrtgatgagctaccaaccaagaaggggbrgaggaacyrtttcmagtggggcccagcatcccagcagatcctgttccaggcctrtgagaggcagaagaaccctagcaaggaggagcgagagacgctagtgkaggagtgcaatagggcggaabgcatccagagaggggtgtccccatcacaggcacaggggmtgggcwccaacctcgwcayggaggtgygtgtctacaactggtttgccaacbrgyrcaaagaagaagccttccggcacaagctggccatggacacgtacagcggscsccccccagggccaggcccgggacctgcgctgcccgctcacagctcccctggcctgcctccacctgccctctcccccagtaaggtccacrgtgtgcgctatggacagcctgcgaccagtgagactgcagaagtaccctcaagcagcggcggtcccttagtgacagtgtctacacccctccaccaagtgtcccccaygggcctggagcccagccacagcctgctgagtacagaagccaagctggtctcagcagctgggggccccctcccccctgtcagcaccctgacagcactgcacagcttggagcagacatccccaggcctcaaccagcagccccagaacctcatcatggcctcacttcctggggtcatgaccatcsggcctggtgagcctgcctccctgggtcctacgttcaccaacacaggtgcctscaycctggtcatcggtaagctggtggggatgggtgggcacctgggtgggaggctcatggggcaaccgcagaatccaggagctggaagagccactgggactcattcattcattcattcattcatacaacatgtatttatccagtgcctactctggaccagtcactgtgctacatcagtgatacctggg

SEQ ID NO: 195 - DNA, 1649 bp, Homo sapiens
  misc_feature (1)...(1649): n = A,T,C or G, or insertion/deletion polymorphism (see Tables 1-2)
cgtggccctgtggcagccgagccatggtttctaaactgagcyagctgcagacggagcwcctggcggccctgctsgagtcarggctgagcaaagaggcactgmtccaggcactggrtgagccggggccctacctcctggctggagaaggccccctggacaaggrgragtcctgcggcggcggtcgaggggagctggctgagctgcccaatgggctgggggagactcggggctccgaggacgagacggacgacgatggggaagacttcacgccacccatcctcaaagagctggagaacctyagccctgaggaggcggyccaccagaaagccgtggtggagacccttctgcaggaggacccgtggcgtgtggcgaagatggtcaagtcctrcctgcagcagcacaacawcmcacagyrgragrtggtcgataccactggcctcaaccagtycyacctgtcccaacacctcaacaagggcactcccatgaagacgcagaakyrggccrccctgtacacctggtacgtccgcaagcagygagaggtggcgcagcagttcacccatgcagggcagggagggctgattgaagagcccacagrtgatgagctaccaaccaagaaggggbrgaggaacyrtttcmagtggggcccagcatcccagcagatcctgttccaggcctrtgagaggcagaagaaccctagcaaggaggagcgagagacgctagtgkaggagtgcaatagggcggaabgcatccagagaggggtgtccccatcacaggcacaggggmtgggcwccaacctcgwcayggaggtgygtgtctacaactggtttgccaacbrgyrcaaagaagaagccttccggcacaagctggccatggacacgtacagcggscsccccccagggccaggcccgggacctgcgctgcccgctcacagctcccctggcctgcctccacctgccctctcccccagtaaggtccacrgtgtgcgctatggacagcctgcgaccagtgagactgcagaagtaccctcaagcagcggcggtcccttagtgacagtgtctacacccctccaccaagtgtcccccaygggcctggagcccagccacagcctgctgagtacagaagccaagctggtctcagcagctgggggccccctcccccctgtcagcaccctgacagcactgcacagcttggagcagacatccccaggcctcaaccagcagccccagaacctcatcatggcctcacttcctggggtcatgaccatcsggcctggtgagcctgcctccctgggtcctacgttcaccaacacaggtgcctscaycctggtcatcggcctggcctccacgcaggcacagagtgtgccggtcatcaacagcatgggcagcagcctgaccaccytgcagcccgtccagttctccyagccgctgcacccctcctaccagcagccgctcatgccacctgtgcagagccatgtgaccyaganccccttcatggccaccatggctcagctgcagagcccccacggtgagcrccctgtgccccacacagcaggagatgatgatagaggttggctgtcaatggatgcaggggaaaggggtgcctggcaggcattgcagtctgcatgtgtctctgggacaagtgtktttccg

SEQ ID NO: 196 - DNA, 3591 bp, Homo sapiens
  misc_feature (1)...(3591): n = A,T,C or G, or insertion/deletion polymorphism (see Tables 1-2)
cgtggccctgtggcagccgagccatggtttctaaactgagcyagctgcagacggagcwcctggcggccctgctsgagtcarggctgagcaaagaggcactgmtccaggcactggrtgagccggggccctacctcctggctggagaaggccccctggacaaggrgragtcctgcggcggcggtcgaggggagctggctgagctgcccaatgggctgggggagactcggggctccgaggacgagacggacgacgatggggaagacttcacgccacccatcctcaaagagctggagaacctyagccctgaggaggcggyccaccagaaagccgtggtggagacccttctgcaggaggacccgtggcgtgtggcgaagatggtcaagtcctrcctgcagcagcacaacawcmcacagyrgragrtggtcgataccactggcctcaaccagtycyacctgtcccaacacctcaacaagggcactcccatgaagacgcagaakyrggccrccctgtacacctggtacgtccgcaagcagygagaggtggcgcagcagttcacccatgcagggcagggagggctgattgaagagcccacagrtgatgagctaccaaccaagaaggggbrgaggaacyrtttcmagtggggcccagcatcccagcagatcctgttccaggcctrtgagaggcagaagaaccctagcaaggaggagcgagagacgctagtgkaggagtgcaatagggcggaabgcatccagagaggggtgtccccatcacaggcacaggggmtgggcwccaacctcgwcayggaggtgygtgtctacaactggtttgccaacbrgyrcaaagaagaagccttccggcacaagctggccatggacacgtacagcggscsccccccagggccaggcccgggacctgcgctgcccgctcacagctcccctggcctgcctccacctgccctctcccccagtaaggtccacrgtgtgcgctatggacagcctgcgaccagtgagactgcagaagtaccctcaagcagcggcggtcccttagtgacagtgtctacacccctccaccaagtgtcccccaygggcctggagcccagccacagcctgctgagtacagaagccaagctggtctcagcagctgggggccccctcccccctgtcagcaccctgacagcactgcacagcttggagcagacatccccaggcctcaaccagcagccccagaacctcatcatggcctcacttcctggggtcatgaccatcsggcctggtgagcctgcctccctgggtcctacgttcaccaacacaggtgcctscaycctggtcatcggcctggcctccacgcaggcacagagtgtgccggtcatcaacagcatgggcagcagcctgaccaccytgcagcccgtccagttctccyagccgctgcacccctcctaccagcagccgctcatgccacctgtgcagagccatgtgaccyaganccccttcatggccaccatggctcagctgcagagcccccacgccctctacagccacaagcccgaggtggcccagtacacccrcacgggcctgctccygcagaytrtgctcatcaccgacaccaccaacctgagcgccctggccagcctcasgcccaccaagcaggtcttcacctcagacactgaggcctccagtgagtccgggcttcacacgccggcatctcaggccaccaccctccacrtccccagccaggaccctgccrgcatccagcacctgcagccggcccacsrgctcagcgccagccccacagtgtcctccagcakcctggtgctgtaccagagctcagactccagcaatggccagagccacctgctgccatccaaccacagcrtcatsragaycttcatctccacccagatggcctcttcctcccagtaaccacggcacctgggccctggggcctgtactgcctgcttggggggtgatgagggcagcagccagccctgcctggaggacctgagcctgccgagcaaccgtggcccttcctggacagctgtgcctcgctccccactctgctctgatgcatcagaaagggagggctctgaggcgccccaacccgtggaggctgctcgggktgcacaggagggggtcgtggagagctaggagcaaagcctgttcatggcagatgtaggagggactgtcgctgcttcgtgggatacagtcttcttacttggaactgaagggggcggcctatgacttgggcacccccagcctgggcctatggagagccctgggaccgctacaccactctggcagccacacttctcaggacacaggcctgtgtagctgtgacctgctgagctctgagaggccctrgatcagcgtggccttgttctgtcaccaatgtacccaccgggccactccttcctgccccaactccttccagctagtgacccacatgccatttgtactgaccccatcacctactcacacaggmatttcctgggtggctactctgtgccagagcctggggctctaacgcctgagcccagggaggccgaagctaacagggaaggcaggcagggctctcctggcttcccatccccagcgattccctctcccaggccccatgacctccagctttcctgtatttgttcccaagagcatcatgcctctgaggccagcctggcctcctgcctctactgggaaggctacttcggggctgggaagtcgtccttactcctgtgggagcctcgcaacccgtgccaagtccaggtcctggtggggcagctcctctgtctcgagcgccctgcagaccctgcccttgtttggggcaggagtagctgagctcacaaggcagcaaggcccgagcagctgagcagggccggggaactggccaagctgaggtgcccaggagaagaaagaggtgaccccagggcacaggagctacctgtgtggacaggactaacactcagaagcctgggggcctggctggctgagggcagttcgcagccaccctgaggagtctgaggtcctgagcactgccaggagggacaaaggagcctgtgaacccaggacaagcatggtcccacatccctgggcctgctgctgagaacctggccttcagtgtaccgcgtctaccctgggattcaggaaaaggcctggggtgacccggcaccccctgcagcttgtagccagccggggcgagtggcacgtttatttaacttttagtaaagtcaaggagaaatgcggtggaaacttcttgcttgtccacaaatcattcagatggggtttgggcaggtagcgggaggctggggcaggccagaggcctgcgaagaggagacaggctccagcacccacgctctcacaccccacatctctgcttttcttgctctgctgagactctaatgacaaagccagatttcatcttaacctcaagcttctactttttaaaaaaattttgttttggagacagggtctcactgtcacccaggctggactgcagtggcattatacagctcactgcagccttgaactcctggactaaagggatcctcccacctcagcctcacaagcagcctcacaggcgctcactaccatgcccaactaa

SEQ ID NO: 197 - DNA, 3191 bp, Homo sapiens
acaatcctttgcggtggttcaagatggcggcgcccagtggcacwgtgagcgattcggaaagtagtaacagcagtagcgatgcggaggagctggagcggtgccgcgaggcggcaatgccggcttggggcttggagcaacgcccgcacgtggcarggaagccaagagccggtgctgcaaatagccagttgtcaacctcccaaccgagcctcaggcataaggtgaatgagcatgaacaagatggcaacgagcttcagaccacccctgaattccgagcccacgtagccaagaagctgggagccctgctggacagcttcattaccatctcagaagcagcaaaggagccagcaaaagctaaggtacagaaagtcgctttggaggatgatggtttccgccttttcttcacatctgtccctggaggccgtgagaaggaagagtctccccaaccccsccgaaagcgacagccctccagctccagtgaggacagtgacgaggagtggcggcggtgccgggaggcagctgtgtcggcgtccgacatcctacaggagtcagccatycacagccctggaacwgtggagaaggaggcaaagaagaaaaggaagttgaaaaagaaagccaagaaggtggccagtgtcgactcggctgtcgctgccaccacccccaccagcatggccacagtccagaagcagaagtcaggtgagctcaayggggaccaggtgtcgcttgggaccaaaaagaagaaaaaggcaaagaaggccagcgagacctctccattcccaccagcaaagagtgctacagctatacctgcaaactgaacccagccatgggcacagggctcagccagctccaaggacaaggtgtcccccccaccctggggacaaggcatttccaagccccmcctccctctccaagttcaaggactgggctggcaaacccagactgcccatgagaccctgatggtgatgaaggcttgctcgagagttgggccaaaaaagcccctctgtgctcccacggagggctggcgggggcgctgtggttccagaacatttcatgacctcaggaaaaaaggaaccttccagttatttgagactagtggccaagtggtgaaacctccatctccctagaactgtctgaggtgggcaggggaagggagaccttccccaccacctccttagcctggtgtgagaaacagtttttagaaaatgagagaagggatccccaagaggccaaggcccagagaaacttttgttcttctctccttagcccacawagacttmacagaatcgtctgagaaaggrgagctttttcacccctggctttctagaattttctttgtctgcatttgtgaatataccacacatgatggtgtctctgagccgaccagattatggaaactcaattgtcagaggacccaaaacaaaacttagagtgatttggatattgcctctctgtcaatgctgaaccttaagacattttaagtaaacatcctcctcctctctacacccccaggatttgtgcgttcaccccacccaagacttcaggaagtgtcatagcactcgtggactaggtttcatgggacaaaggcattctgcaagaagtagaagcttgtggccgggtgcagtggctcatgcctgtaatccaagcattttgagaggccaaggaggtggatcaattgaggccaggagtttgagaccagcctggccaacatggcgagaccccatctctactaaaaatacaaaaattagctgagcatgttgacacacgcccgtaatcccagctactcaggaggctgaggtgggagaatcgcttgaacccaggaggtgcaggttgcagtgagccgagattgcgccactgcactctagcctaagcaatggagcaagaccctatctcaaaaaaaaaaaaaaaaaagaaaaagaaaagaagtagaagctcatggccagggatggtggctcacacctgtaatcccagcactttgggaggccgaggcaggtggatcacttgagccragttccagaccagcctaggcaacatggtgaaacctcgtctctataaaaaaaagaatacaaaaattagttgggcatggtagtgagcgcctgtgaggctgcttgtgaggctgaggtgggaggatccctttagtccaggagttcaaggctgcagtgagctgtataatgccactgcagtccagcctgggtgacagtgagaccctgtctccaaaacaaaatttttttaaaaagtagaagcttgaggttaagatgaaatctggctttgtcattagagtctcagcagagcaagaaaagcagagatgtggggtgtgagagcgtgggtgctggagcctgtctcctcttcgcaggcctctggcctgccccagcctcccgctacctgcccaaaccccatctgaatgatttgtggacaagcaagaagtttccaccgcatttctccttgactttactaaaagttaaataaacgtgccactcgccccggctggctacaagctgcagggggtgccgggtcaccccaggccttttcctgaatcccagggtagacgcggtacactgaaggccaggttctcagcagcaggcccagggatgtgggaccatgcttgtcctgggttcacaggctcctttgtccctcctggcagtgctcaggacctcagactcctcagggtggctgcgaactgccctcagccagccaggcccccaggcttctgagtgttagtcctgtccacacaggtagctcctgtgccctggggtcacctctttcttctcctgggcacctcagcttggccagttccccggccctgctcagctgctcgggccttgctgccttgtgagctcagctactcctgccccaaacaagggcagggtctgcagggcgctcgagacagaggagctgccccaccaggacctggacttggcacgggttgcgaggctcccacaggagtaaggacgacttcccagccccgaagtagccttcccagtagaggcaggaggccaggctggcctcagaggcatgatgctcttgggaacaaatacaggaaagctggaggtcatggggcctgggagagggaatcgctggggatgggaagccaggagagccctgcctgccttccctgttagcttcggcctccctgggctcaggcgttagagccccaggctctggcacagagtagccacccaggaaatkcctgtgtgagt

SEQ ID NO: 198 - DNA, 4911 bp, Homo sapiens
cgaccggtgcgcttgccagatccgccgcgaagccgggatcgaaggcgacagcgcggccaagggggcgcggccgggacaagctgggggccggttgcccggggcagggacggcggcgacccggccgctggggaggcaggaagatagacccacggatcttaggaagggatccgagagcgcagctgtgaaactggctggggctgggggcacgaaaccgatcagcgctacggagcgcagcggccggcgggttccagtgtcctccggcggcgcggggagcaggtgaacaggtcctcacgcccagctccgcgccctcacgcgctctcgccgggaccccgcttccgctggcagccatgggccccggccccagccgcgcgccccgcgccccacgcctgatgctctgtgcgctcgccttgatggtggcggccggcggctgcgtcgtctccgccttcaacctggatacccgattcctggtagtgaaggaggccgggaacccgggcagcctcttcggctactcggtcgccctccatcggcagacagagcggcagcagcgctacctgctcctggctggtgccccccgggagctcgctgtgcccgatggctacaccaaccggactggtgctgtgtacctgtgcccactcactgcccacaaggatgactgtgagcggatgaacatcacartgaaaaatgaccctggccatcacattattgaggacatgtggcttggagtgactgtggccagccagggcccygcaggcagagttctggtctgtgcccaccgctacacccaggtgctgtggtcagggtcagaagaccagcggcgcatggtgggcaagtgctacgtgcgaggcaatgacctagagctggactccagtgatgactggcagacctaccacaacgagatgtgcaatagcaacacagactacctggagacgggcatgtgccagctgggcaccagcggtggcttcacccagaacactgtgtacttcggcgcccccggtgcctacaactggaaaggaaacagctacatgattcagcgyaaggagtgggacttatctgagtatagttacaaggacccagaggaccaaggaaacctctatattgggtacacgatgcaggtaggcagcttcatcctgcaccccaaaaacatcaccattgtgacaggtgccccacggcaccgacatatgggcgcggtgttcttgctgagccaggaggcaggcggagacctgcggaggaggcaggtgctggagggctcgcaggtgggcgcctattttggcagcgycattgccctggcagacctgaacaatgatgggtggcaggacctcctggtgggcgccccctactacttygagaggaaagaggaagtagggggtgccatctatgtcttcatgaaccaggcgggaacctccttccctgctcacccctcactccttcttcatggccccagtggctctgcctttggtttwtctgtggccagcattggtgacatcaaccaggatggatttcaggatattgctgtgggagctccgtttgaaggcttgggcaaagtgtacatctatcacagtagctctaaggggctcctyagacagccccagcaggtaatccatggagagaagctgggactgcctgggttggccaccttcggctattccctcagtgggcagatggatgtggatgagaacttctacccagaccttctagygggaagcctgtcagaccacattgtgctgctgcgggcccggcccgtcatcaacatcgtccacaagaccttgrtgcccaggccagctgtgctggaccctgcactttgcacggccacctcttgtgtgcaagtggagctgtgctttgcttacaaccagagtgccgggaaccccaactacaggcgaaacatcaccctggcctacactctggaggctgacagggaccgccggccgccccggctccgctttgccggcagtgagtccgctgtcttccacggcttcttctccatgcccgagatgcgctgccagaagctggagctgctcctgatggacaacctccgtgacaaactccgccccatcatcatctccatgaactactctttacctttgcggatgcccgatcgcccccggctggggctgcggtccctggacgcctacccgatcctcaaccaggcacaggctctggagaaccacactgaggtccagttccagaaggagtgcgggcctgacaacaagtgtgagagcaacttgcagatgcgggcagccttcgtgtcagagcagcagcagaagctgagcaggctccagtacagcagagacgtccggaaattgctcctgagcatcaacgtgacgaacacccggacctcggagcgctccggggaggacgcccacgaggcgctgctcaccctggtggtgcctcccgcyctgctgctgtcctcagtgcgcccccccggggcctgccaagctaatgagaccatcttttgcgagctggggaaccccttcaaacggaaccagaggatggagctgctcatcrcctttgaggtcatcggggtgaccctgcacacaagggaccttcaggtgcagctgcagctctccacgtcgagtcaccaggacaacctgtggcccatgatcctcactctgctggtggactatacactccagacctcgcttagcatggtaaatcaccggctacaaagcttctttggggggacagtgatgggtgagtctggcatgaaaactgtggaggatgtaggaagccccctcaagtatgaattccaggtgggcccaatgggggaggggctggtgggcctggggaccctggtcctaggtctggagtggccctacgaagtcagcaatggcaagtggctgctgtatcccacggagatcaccgtccatrgcaatgggtcctggccctgccgaccacctggagaccttatcaaccctctcaacctcactctttctgaccctggggacaggccatcatccccacagcgcaggcggcgacagctggatccagggggaggccagggccccccacctgtcactctggctgctgccaaaaaagccaagtctgagactgtgctgacctgtgccacagggcgtgcccactgtgtgtggctagagtgccccatccctgatgcccccgttgtcaccaacgtgactgtgaaggcacgagtgtggaacagcaccttcatcgaggattacagagactttgaccgagtccgggtaaatggctgggctaccctattcctccgaaccagcatccccaccatcaacatggagaacaagaccacgtggttctctgtggacattgactcggagctggtggaggagctgccggccgaaatcgagctgtggctggtgctggtggccgtgggtgcagggctgctgctgcwggggctgatcatcmtcctgmtgtggaagtgcggcttcttcaagcgagcccgcactcgcgccctgtatgaagctaagaggcagaaggcggagatgaagagccagccgtcagagacagagaggctgaccgacgactactgagggggcagccccccgcccccggcccacctggtgtgacttctttaagcggacccgctattatcagatcatgcccaagtaccacgcagtgcggatccgggaggaggagcgctacccacctccagggagcaccctgcccaccaagaagcactgggtgaccagctggcagactcgggaccaatactactgacgtcctccctgatcccaccccctcctcccccagtgtcccctttcttcctatttatcataagttatgcctctgacagtccacaggggccaccacctttggctggtagcagcaggctcaggcacatacacctcgtcaagagcatgcacatgctgtctggccctggggatcttcccacaggagggccagcgctgtggaccttacaacgccgagtgcactgcattcctgtgccctagatgcacgtggggcccactgctcgtggactgtgctggtgcatcacggatggtgcatgggctcgccgtgtctcagcctctgccagcgccaaaacaagccaaagagcctcccaccagagcygggaggaaaaggcccctgcaatgtggtgacacctccccctttcacactggatccatcttgagccacagtcactggattgactttgctgtcaaaactactgacagggagcagcccccgggycgctrgytggtggrcccccaatgacacccatgccagagaggtggggatcctgcctaaggttgtctacgggggcacttggaggacctggcgtgctcagacccaacagcaaaggaactagaaagaaggacccagaacggcttgctttcctgcatctctgtgaagcctctctccttggccacagactgaactcgcagggartgcagcaggaaggaacaaagacaggcaaacggcaacgtagcctgggctcactgtgctggggcayggcgggatcctccacagagaggaggggaccaattctggacagacagatgttgggaggatacagaggagatgccacttctcactcaccactaccagccagcctcagaaggccccagagagaccctgcaagaccacggagggagcgacacttgaatgtagaataggcagggggccctgccccaccccatccagccagaccccacgctgaccatgygtcaggggcctagaggtggagttyttagctatccttggctttcwgwgccagcctggctctgccccctcccccatgggctgtgtcctaaggcccatttgagaagctgaggctagttccagaaaacctctcctgacccctgcctgttggcaggcccactccccagccccagccccttccatggtactgtagcaggggaattccctccccctccttgtgccttctttgtatataggcttctcacggcgaccaataaacagctcccagtttgtatgcag

SEQ ID NO: 199 - DNA, 4712 bp, Homo sapiens
cgaccggtgcgcttgccagatccgccgcgaagccgggatcgaaggcgacagcgcggccaagggggcgcggccgggacaagctgggggccggttgcccggggcagggacggcggcgacccggccgctggggaggcaggaagatagacccacggatcttaggaagggatccgagagcgcagctgtgaaactggctggggctgggggcacgaaaccgatcagcgctacggagcgcagcggccggcgggttccagtgtcctccggcggcgcggggagcaggtgaacaggtcctcacgcccagctccgcgccctcacgcgctctcgccgggaccccgcttccgctggcagccatgggccccggccccagccgcgcgccccgcgccccacgcctgatgctctgtgcgctcgccttgatggtggcggccggcggctgcgtcgtctccgccttcaacctggatacccgattcctggtagtgaaggaggccgggaacccgggcagcctcttcggctactcggtcgccctccatcggcagacagagcggcagcagcgctacctgctcctggctggtgccccccgggagctcgctgtgcccgatggctacaccaaccggactggtgctgtgtacctgtgcccactcactgcccacaaggatgactgtgagcggatgaacatcacartgaaaaatgaccctggccatcacattattgaggacatgtggcttggagtgactgtggccagccagggcccygcaggcagagttctggtctgtgcccaccgctacacccaggtgctgtggtcagggtcagaagaccagcggcgcatggtgggcaagtgctacgtgcgaggcaatgacctagagctggactccagtgatgactggcagacctaccacaacgagatgtgcaatagcaacacagactacctggagacgggcatgtgccagctgggcaccagcggtggcttcacccagaacactgtgtacttcggcgcccccggtgcctacaactggaaaggaaacagctacatgattcagcgyaaggagtgggacttatctgagtatagttacaaggacccagaggaccaaggaaacctctatattgggtacacgatgcaggtaggcagcttcatcctgcaccccaaaaacatcaccattgtgacaggtgccccacggcaccgacatatgggcgcggtgttcttgctgagccaggaggcaggcggagacctgcggaggaggcaggtgctggagggctcgcaggtgggcgcctattttggcagcgycattgccctggcagacctgaacaatgatgggtggcaggacctcctggtgggcgccccctactacttygagaggaaagaggaagtagggggtgccatctatgtcttcatgaaccaggcgggaacctccttccctgctcacccctcactccttcttcatggccccagtggctctgcctttggtttwtctgtggccagcattggtgacatcaaccaggatggatttcaggatattgctgtgggagctccgtttgaaggcttgggcaaagtgtacatctatcacagtagctctaaggggctcctyagacagccccagcaggtaatccatggagagaagctgggactgcctgggttggccaccttcggctattccctcagtgggcagatggatgtggatgagaacttctacccagaccttctagygggaagcctgtcagaccacattgtgctgctgcgggcccggcccgtcatcaacatcgtccacaagaccttgrtgcccaggccagctgtgctggaccctgcactttgcacggccacctcttgtgtgcaagtggagctgtgctttgcttacaaccagagtgccgggaaccccaactacaggcgaaacatcaccctggcctacactctggaggctgacagggaccgccggccgccccggctccgctttgccggcagtgagtccgctgtcttccacggcttcttctccatgcccgagatgcgctgccagaagctggagctgctcctgatggacaacctccgtgacaaactccgccccatcatcatctccatgaactactctttacctttgcggatgcccgatcgcccccggctggggctgcggtccctggacgcctacccgatcctcaaccaggcacaggctctggagaaccacactgaggtccagttccagaaggagtgcgggcctgacaacaagtgtgagagcaacttgcagatgcgggcagccttcgtgtcagagcagcagcagaagctgagcaggctccagtacagcagagacgtccggaaattgctcctgagcatcaacgtgacgaacacccggacctcggagcgctccggggaggacgcccacgaggcgctgctcaccctggtggtgcctcccgcyctgctgctgtcctcagtgcgcccccccggggcctgccaagctaatgagaccatcttttgcgagctggggaaccccttcaaacggaaccagaggatggagctgctcatcrcctttgaggtcatcggggtgaccctgcacacaagggaccttcaggtgcagctgcagctctccacgtcgagtcaccaggacaacctgtggcccatgatcctcactctgctggtggactatacactccagacctcgcttagcatggtaaatcaccggctacaaagcttctttggggggacagtgatgggtgagtctggcatgaaaactgtggaggatgtaggaagccccctcaagtatgaattccaggtgggcccaatgggggaggggctggtgggcctggggaccctggtcctaggtctggagtggccctacgaagtcagcaatggcaagtggctgctgtatcccacggagatcaccgtccatrgcaatgggtcctggccctgccgaccacctggagaccttatcaaccctctcaacctcactctttctgaccctggggacaggccatcatccccacagcgcaggcggcgacagctggatccagggggaggccagggccccccacctgtcactctggctgctgccaaaaaagccaagtctgagactgtgctgacctgtgccacagggcgtgcccactgtgtgtggctagagtgccccatccctgatgcccccgttgtcaccaacgtgactgtgaaggcacgagtgtggaacagcaccttcatcgaggattacagagactttgaccgagtccgggtaaatggctgggctaccctattcctccgaaccagcatccccaccatcaacatggagaacaagaccacgtggttctctgtggacattgactcggagctggtggaggagctgccggccgaaatcgagctgtggctggtgctggtggccgtgggtgcagggctgctgctgcwggggctgatcatcmtcctgmtgtggaagtgtgacttctttaagcggacccgctattatcagatcatgcccaagtaccacgcagtgcggatccgggaggaggagcgctacccacctccagggagcaccctgcccaccaagaagcactgggtgaccagctggcagactcgggaccaatactactgacgtcctccctgatcccaccccctcctcccccagtgtcccctttcttcctatttatcataagttatgcctctgacagtccacaggggccaccacctttggctggtagcagcaggctcaggcacatacacctcgtcaagagcatgcacatgctgtctggccctggggatcttcccacaggagggccagcgctgtggaccttacaacgccgagtgcactgcattcctgtgccctagatgcacgtggggcccactgctcgtggactgtgctggtgcatcacggatggtgcatgggctcgccgtgtctcagcctctgccagcgccaaaacaagccaaagagcctcccaccagagcygggaggaaaaggcccctgcaatgtggtgacacctccccctttcacactggatccatcttgagccacagtcactggattgactttgctgtcaaaactactgacagggagcagcccccgggycgctrgytggtggrcccccaatgacacccatgccagagaggtggggatcctgcctaaggttgtctacgggggcacttggaggacctggcgtgctcagacccaacagcaaaggaactagaaagaaggacccagaacggcttgctttcctgcatctctgtgaagcctctctccttggccacagactgaactcgcagggartgcagcaggaaggaacaaagacaggcaaacggcaacgtagcctgggctcactgtgctggggcayggcgggatcctccacagagaggaggggaccaattctggacagacagatgttgggaggatacagaggagataccctgcaagaccacggagggagcgacacttgaatgtagaataggcagggggccctgccccaccccatccagccagaccccacgctgaccatgygtcaggggcctagaggtggagttyttagctatccttggctttcwgwgccagcctggctctgccccctcccccatgggctgtgtcctaaggcccatttgagaagctgaggctagttccagaaaacctctcctgacccctgcctgttggcaggcccactccccagccccagccccttccatggtactgtagcaggggaattccctccccctccttgtgccttctttgtatataggcttctcacggcgaccaataaacagctcccagttt

SEQ ID NO: 200 - DNA, 4769 bp, Homo sapiens
cgaccggtgcgcttgccagatccgccgcgaagccgggatcgaaggcgacagcgcggccaagggggcgcggccgggacaagctgggggccggttgcccggggcagggacggcggcgacccggccgctggggaggcaggaagatagacccacggatcttaggaagggatccgagagcgcagctgtgaaactggctggggctgggggcacgaaaccgatcagcgctacggagcgcagcggccggcgggttccagtgtcctccggcggcgcggggagcaggtgaacaggtcctcacgcccagctccgcgccctcacgcgctctcgccgggaccccgcttccgctggcagccatgggccccggccccagccgcgcgccccgcgccccacgcctgatgctctgtgcgctcgccttgatggtggcggccggcggctgcgtcgtctccgccttcaacctggatacccgattcctggtagtgaaggaggccgggaacccgggcagcctcttcggctactcggtcgccctccatcggcagacagagcggcagcagcgctacctgctcctggctggtgccccccgggagctcgctgtgcccgatggctacaccaaccggactggtgctgtgtacctgtgcccactcactgcccacaaggatgactgtgagcggatgaacatcacartgaaaaatgaccctggccatcacattattgaggacatgtggcttggagtgactgtggccagccagggcccygcaggcagagttctggtctgtgcccaccgctacacccaggtgctgtggtcagggtcagaagaccagcggcgcatggtgggcaagtgctacgtgcgaggcaatgacctagagctggactccagtgatgactggcagacctaccacaacgagatgtgcaatagcaacacagactacctggagacgggcatgtgccagctgggcaccagcggtggcttcacccagaacactgtgtacttcggcgcccccggtgcctacaactggaaaggaaacagctacatgattcagcgyaaggagtgggacttatctgagtatagttacaaggacccagaggaccaaggaaacctctatattgggtacacgatgcaggtaggcagcttcatcctgcaccccaaaaacatcaccattgtgacaggtgccccacggcaccgacatatgggcgcggtgttcttgctgagccaggaggcaggcggagacctgcggaggaggcaggtgctggagggctcgcaggtgggcgcctattttggcagcgycattgccctggcagacctgaacaatgatgggtggcaggacctcctggtgggcgccccctactacttygagaggaaagaggaagtagggggtgccatctatgtcttcatgaaccaggcgggaacctccttccctgctcacccctcactccttcttcatggccccagtggctctgcctttggtttwtctgtggccagcattggtgacatcaaccaggatggatttcaggatattgctgtgggagctccgtttgaaggcttgggcaaagtgtacatctatcacagtagctctaaggggctcctyagacagccccagcaggtaatccatggagagaagctgggactgcctgggttggccaccttcggctattccctcagtgggcagatggatgtggatgagaacttctacccagaccttctagygggaagcctgtcagaccacattgtgctgctgcgggcccggcccgtcatcaacatcgtccacaagaccttgrtgcccaggccagctgtgctggaccctgcactttgcacggccacctcttgtgtgcaagtggagctgtgctttgcttacaaccagagtgccgggaaccccaactacaggcgaaacatcaccctggcctacactctggaggctgacagggaccgccggccgccccggctccgctttgccggcagtgagtccgctgtcttccacggcttcttctccatgcccgagatgcgctgccagaagctggagctgctcctgatggacaacctccgtgacaaactccgccccatcatcatctccatgaactactctttacctttgcggatgcccgatcgcccccggctggggctgcggtccctggacgcctacccgatcctcaaccaggcacaggctctggagaaccacactgaggtccagttccagaaggagtgcgggcctgacaacaagtgtgagagcaacttgcagatgcgggcagccttcgtgtcagagcagcagcagaagctgagcaggctccagtacagcagagacgtccggaaattgctcctgagcatcaacgtgacgaacacccggacctcggagcgctccggggaggacgcccacgaggcgctgctcaccctggtggtgcctcccgcyctgctgctgtcctcagtgcgcccccccggggcctgccaagctaatgagaccatcttttgcgagctggggaaccccttcaaacggaaccagaggatggagctgctcatcrcctttgaggtcatcggggtgaccctgcacacaagggaccttcaggtgcagctgcagctctccacgtcgagtcaccaggacaacctgtggcccatgatcctcactctgctggtggactatacactccagacctcgcttagcatggtaaatcaccggctacaaagcttctttggggggacagtgatgggtgagtctggcatgaaaactgtggaggatgtaggaagccccctcaagtatgaattccaggtgggcccaatgggggaggggctggtgggcctggggaccctggtcctaggtctggagtggccctacgaagtcagcaatggcaagtggctgctgtatcccacggagatcaccgtccatrgcaatgggtcctggccctgccgaccacctggagaccttatcaaccctctcaacctcactctttctgaccctggggacaggccatcatccccacagcgcaggcggcgacagctggatccagggggaggccagggccccccacctgtcactctggctgctgccaaaaaagccaagtctgagactgtgctgacctgtgccacagggcgtgcccactgtgtgtggctagagtgccccatccctgatgcccccgttgtcaccaacgtgactgtgaaggcacgagtgtggaacagcaccttcatcgaggattacagagactttgaccgagtccgggtaaatggctgggctaccctattcctccgaaccagcatccccaccatcaacatggagaacaagaccacgtggttctctgtggacattgactcggagctggtggaggagctgccggccgaaatcgagctgtggctggtgctggtggccgtgggtgcagggctgctgctgcwggggctgatcatcmtcctgmtgtggaagtgtgacttctttaagcggacccgctattatcagatcatgcccaagtaccacgcagtgcggatccgggaggaggagcgctacccacctccagggagcaccctgcccaccaagaagcactgggtgaccagctggcagactcgggaccaatactactgacgtcctccctgatcccaccccctcctcccccagtgtcccctttcttcctatttatcataagttatgcctctgacagtccacaggggccaccacctttggctggtagcagcaggctcaggcacatacacctcgtcaagagcatgcacatgctgtctggccctggggatcttcccacaggagggccagcgctgtggaccttacaacgccgagtgcactgcattcctgtgccctagatgcacgtggggcccactgctcgtggactgtgctggtgcatcacggatggtgcatgggctcgccgtgtctcagcctctgccagcgccaaaacaagccaaagagcctcccaccagagcygggaggaaaaggcccctgcaatgtggtgacacctccccctttcacactggatccatcttgagccacagtcactggattgactttgctgtcaaaactactgacagggagcagcccccgggycgctrgytggtggrcccccaatgacacccatgccagagaggtggggatcctgcctaaggttgtctacgggggcacttggaggacctggcgtgctcagacccaacagcaaaggaactagaaagaaggacccagaacggcttgctttcctgcatctctgtgaagcctctctccttggccacagactgaactcgcagggartgcagcaggaaggaacaaagacaggcaaacggcaacgtagcctgggctcactgtgctggggcayggcgggatcctccacagagaggaggggaccaattctggacagacagatgttgggaggatacagaggagatgccacttctcactcaccactaccagccagcctcagaaggccccagagagaccctgcaagaccacggagggagcgacacttgaatgtagaataggcagggggccctgccccaccccatccagccagaccccacgctgaccatgygtcaggggcctagaggtggagttyttagctatccttggctttcwgwgccagcctggctctgccccctcccccatgggctgtgtcctaaggcccatttgagaagctgaggctagttccagaaaacctctcctgacccctgcctgttggcaggcccactccccagccccagccccttccatggtactgtagcaggggaattccctccccctccttgtgccttctttgtatataggcttctcacggcgaccaataaacagctcccagtttgtatgcag

SEQ ID NO: 201 - DNA, 4854 bp, Homo sapiens
cgaccggtgcgcttgccagatccgccgcgaagccgggatcgaaggcgacagcgcggccaagggggcgcggccgggacaagctgggggccggttgcccggggcagggacggcggcgacccggccgctggggaggcaggaagatagacccacggatcttaggaagggatccgagagcgcagctgtgaaactggctggggctgggggcacgaaaccgatcagcgctacggagcgcagcggccggcgggttccagtgtcctccggcggcgcggggagcaggtgaacaggtcctcacgcccagctccgcgccctcacgcgctctcgccgggaccccgcttccgctggcagccatgggccccggccccagccgcgcgccccgcgccccacgcctgatgctctgtgcgctcgccttgatggtggcggccggcggctgcgtcgtctccgccttcaacctggatacccgattcctggtagtgaaggaggccgggaacccgggcagcctcttcggctactcggtcgccctccatcggcagacagagcggcagcagcgctacctgctcctggctggtgccccccgggagctcgctgtgcccgatggctacaccaaccggactggtgctgtgtacctgtgcccactcactgcccacaaggatgactgtgagcggatgaacatcacartgaaaaatgaccctggccatcacattattgaggacatgtggcttggagtgactgtggccagccagggcccygcaggcagagttctggtctgtgcccaccgctacacccaggtgctgtggtcagggtcagaagaccagcggcgcatggtgggcaagtgctacgtgcgaggcaatgacctagagctggactccagtgatgactggcagacctaccacaacgagatgtgcaatagcaacacagactacctggagacgggcatgtgccagctgggcaccagcggtggcttcacccagaacactgtgtacttcggcgcccccggtgcctacaactggaaaggaaacagctacatgattcagcgyaaggagtgggacttatctgagtatagttacaaggacccagaggaccaaggaaacctctatattgggtacacgatgcaggtaggcagcttcatcctgcaccccaaaaacatcaccattgtgacaggtgccccacggcaccgacatatgggcgcggtgttcttgctgagccaggaggcaggcggagacctgcggaggaggcaggtgctggagggctcgcaggtgggcgcctattttggcagcgycattgccctggcagacctgaacaatgatgggtggcaggacctcctggtgggcgccccctactacttygagaggaaagaggaagtagggggtgccatctatgtcttcatgaaccaggcgggaacctccttccctgctcacccctcactccttcttcatggccccagtggctctgcctttggtttwtctgtggccagcattggtgacatcaaccaggatggatttcaggatattgctgtgggagctccgtttgaaggcttgggcaaagtgtacatctatcacagtagctctaaggggctcctyagacagccccagcaggtaatccatggagagaagctgggactgcctgggttggccaccttcggctattccctcagtgggcagatggatgtggatgagaacttctacccagaccttctagygggaagcctgtcagaccacattgtgctgctgcgggcccggcccgtcatcaacatcgtccacaagaccttgrtgcccaggccagctgtgctggaccctgcactttgcacggccacctcttgtgtgcaagtggagctgtgctttgcttacaaccagagtgccgggaaccccaactacaggcgaaacatcaccctggcctacactctggaggctgacagggaccgccggccgccccggctccgctttgccggcagtgagtccgctgtcttccacggcttcttctccatgcccgagatgcgctgccagaagctggagctgctcctgatggacaacctccgtgacaaactccgccccatcatcatctccatgaactactctttacctttgcggatgcccgatcgcccccggctggggctgcggtccctggacgcctacccgatcctcaaccaggcacaggctctggagaaccacactgaggtccagttccagaaggagtgcgggcctgacaacaagtgtgagagcaacttgcagatgcgggcagccttcgtgtcagagcagcagcagaagctgagcaggctccagtacagcagagacgtccggaaattgctcctgagcatcaacgtgacgaacacccggacctcggagcgctccggggaggacgcccacgaggcgctgctcaccctggtggtgcctcccgcyctgctgctgtcctcagtgcgcccccccggggcctgccaagctaatgagaccatcttttgcgagctggggaaccccttcaaacggaaccagaggatggagctgctcatcrcctttgaggtcatcggggtgaccctgcacacaagggaccttcaggtgcagctgcagctctccacgtcgagtcaccaggacaacctgtggcccatgatcctcactctgctggtggactatacactccagacctcgcttagcatggtaaatcaccggctacaaagcttctttggggggacagtgatgggtgagtctggcatgaaaactgtggaggatgtaggaagccccctcaagtatgaattccaggtgggcccaatgggggaggggctggtgggcctggggaccctggtcctaggtctggagtggccctacgaagtcagcaatggcaagtggctgctgtatcccacggagatcaccgtccatrgcaatgggtcctggccctgccgaccacctggagaccttatcaaccctctcaacctcactctttctgaccctggggacaggccatcatccccacagcgcaggcggcgacagctggatccagggggaggccagggccccccacctgtcactctggctgctgccaaaaaagccaagtctgagactgtgctgacctgtgccacagggcgtgcccactgtgtgtggctagagtgccccatccctgatgcccccgttgtcaccaacgtgactgtgaaggcacgagtgtggaacagcaccttcatcgaggattacagagactttgaccgagtccgggtaaatggctgggctaccctattcctccgaaccagcatccccaccatcaacatggagaacaagaccacgtggttctctgtggacattgactcggagctggtggaggagctgccggccgaaatcgagctgtggctggtgctggtggccgtgggtgcagggctgctgctgcwggggctgatcatcmtcctgmtgtggaagtgcggcttcttcaagcgagcccgcactcgcgccctgtatgaagctaagaggcagaaggcggagatgaagagccagccgtcagagacagagaggctgaccgacgactactgagggggcagccccccgcccccggcccacctggtgtgacttctttaagcggacccgctattatcagatcatgcccaagtaccacgcagtgcggatccgggaggaggagcgctacccacctccagggagcaccctgcccaccaagaagcactgggtgaccagctggcagactcgggaccaatactactgacgtcctccctgatcccaccccctcctcccccagtgtcccctttcttcctatttatcataagttatgcctctgacagtccacaggggccaccacctttggctggtagcagcaggctcaggcacatacacctcgtcaagagcatgcacatgctgtctggccctggggatcttcccacaggagggccagcgctgtggaccttacaacgccgagtgcactgcattcctgtgccctagatgcacgtggggcccactgctcgtggactgtgctggtgcatcacggatggtgcatgggctcgccgtgtctcagcctctgccagcgccaaaacaagccaaagagcctcccaccagagcygggaggaaaaggcccctgcaatgtggtgacacctccccctttcacactggatccatcttgagccacagtcactggattgactttgctgtcaaaactactgacagggagcagcccccgggycgctrgytggtggrcccccaatgacacccatgccagagaggtggggatcctgcctaaggttgtctacgggggcacttggaggacctggcgtgctcagacccaacagcaaaggaactagaaagaaggacccagaacggcttgctttcctgcatctctgtgaagcctctctccttggccacagactgaactcgcagggartgcagcaggaaggaacaaagacaggcaaacggcaacgtagcctgggctcactgtgctggggcayggcgggatcctccacagagaggaggggaccaattctggacagacagatgttgggaggatacagaggagataccctgcaagaccacggagggagcgacacttgaatgtagaataggcagggggccctgccccaccccatccagccagaccccacgctgaccatgygtcaggggcctagaggtggagttyttagctatccttggctttcwgwgccagcctggctctgccccctcccccatgggctgtgtcctaaggcccatttgagaagctgaggctagttccagaaaacctctcctgacccctgcctgttggcaggcccactccccagccccagccccttccatggtactgtagcaggggaattccctccccctccttgtgccttctttgtatataggcttctcacggcgaccaataaacagctcccagttt

SEQ ID NO: 202 - DNA, 6196 bp, Homo sapiens
ccaaactgctacatttcagccatgtttgtggcacagctatgtttggctactgggagtcccaggcttatgttccagcctccatgaagcagccattcattttgagatcctgtcacattctggctacttccagagatctgtgagcaaatccctgctgttcaagagaccaacagacttctctctcattcttttgagccttggtgtcacttattattctcagtgaaatccttctttcccatggaagcacccaaagatggcttgggtgaacccctctgcttggttccaccctaaaaactcaccttgtaatccagaggcaaggcaaagattagatgctatgatctagaaatcaggattgatctagcaatggagtctgaagcaagttagggtggttccatgttggttctggtcaactccctggcattaaaaccctcggccacacagaccccacttttaaaaggttattaattctgacatgcccaagttcatctgagttccttagaaagatcaaccagcagcacctacttcacgacctatcctccattccattcaaataacgcggccaataggaaaatcctccgccctgagccaacgactcggcgtagctgagacagcmcgggaggcagatctgccctgtagagccttgcggttccactgctggcctccggattcccgggagcccccagcccgacaggacaaccttccttccccgcttcctcctttccagacccggcggcaggagaggggatgaagatggcggacgcgaagcagaagcggaacgagcagctgaaacgctggatcggctccgagacggacctcgagcctccggtggtgaagcgccagaagaccaaggtgaagttcgacgatggcgccgtcttcctggctgcttgctccagcggcgacacggacgaggtcctcaagctgctgcaccgcggcgccgacatcaattacgccaatgtggacggactcactgccctgcaccaggcttgcattgatgacaatgttgatatggtgaagtttctggtagaaaatggagcaaatattaatcaacctgataatgaaggctggataccactacatgcagcagcttcctgtggatatcttgatattgcagagtttttgattggtcaaggagcacatgtaggggctgtcaacagtgaaggagatacacctttagatattgcggaggaggaggcaatggaagagctacttcaaaatgaagttaatcggcaaggggttgatatagaagcagctcgaaaggaagaagaacggatcatgcttagagatgccaggcagtggctaaatagtggtcatataaatgatgtccggcatgcaaaatctggaggtacagcacttcacgttgcagctgctaaaggctatacggaagttttaaaacttttaatacaggcaggctatgatgttaatattaaagactatgatggctggacacctcttcatgctgcagctcattggggtaaagaagaagcatgtcgaattttagtggacaatctgtgtgatatggagatggtcaacaaagtgggccaaacagcctttgatgtagcagatgaagacattttaggatatttagaagagttgcaaaagaaacaaaatctgctccatagtgaaaaacgggacaagaaatctccactaattgaatcamcagcaaatatggacaataatcagtcacagaagacctttaaaaacaaagagacgttgattattgaaccagagaaaaatgcatcccgtattgaatctctggaacaagaaaaggttgatgaagaagaagaaggaaagaaggatgagtctagctgctctagtgaagaagatgaggaagatgactcggaatcagaagctgaaacagataagacaaaacccctggcttctgtaactaatgccaacacttctagtacacaagcagctcctgtagctgttacaacacctactgtgtcatcaggtcaagcaacacctacatcacctattaaaaagtttccaaccacagctacaaaaatttctcccaaagaagaagagagaaaagatgagtctcctgcaacttggaggttaggacttagaaagacgggcagctatggtgcacttgctgaaatcacagcatctaaagagggtcagaaagaaaaagatactgcaggtgttacacgttcagcttcaagtcccagactttcctcctctttggataataaagaaaaggagaaagatagtaaaggaactaggcttgcatatgttgcacctacaataccaagacgactagccagtacatctgacattgaagagaaagaaaacagagattcttcaagtttgcgaacaagtagttcatatacaaggagaaaatgggaagatgatcttaaaaaaaatagctcagttaatgaaggatcarcgtatcataaaagttgctcctttggtagaagacaagatgatttgattagttctagtgttccaagcaccacatcaacaccaacagttacctctgcagctgggcttcagaaaagcctgctttccagcacaagcactactacaaagattacaacgggttcttcctcagcaggcacacaaagcagtacctcaaatcgtttgtgggctgaggatagtactgagaaagaaaaggacagtgttcctacggcagtgaccattcctgttgctccaactgttgtaaatgctgcagcttctaccacaaccctgactacaactactgctggcactgtctcctccacaacagaggtcagggagagacgcagatcatacctcactcctgttagggatgaagagtctgaatcccaaagaaaagcaagatctagacaagcaagacaatctagaagatcaacacagggagtgacattaactgatcttcaagaagctgagaaaacaataggaagaagtcgttctacccgaaccagagaacaagaaaatgaagaaaaagaaaaagaggaaaaagagaaacaagataaagagaaacaagaagaaaagaaggagtcagaaacatctagagaagatgaatataaacaaaagtactccagaacgtatgatgagacttaccagcgttataggccagtatcaacttcaagttcaaccactccatcctcttcactttctactatgagcagttcactstatgcttcaagtcaactaaacaggccaaatagtcttgtaggcataacttctgcttactccagaggaataacaaaagaaaatgaaagagagggagaaaaaagagaagaggagaaagaaggagaagataaatcacaacctaaatcaatcagagaacgacgacgaccaagagagaaaagaagatctacaggagtttcattttggacacaagatagtgatgaaaatgaacaagaacaacaatcagacacagaagagggatccaataagaaagaaactcaggtaaataccattactttttatatgaaaccagttctacatcagctggtgatcgatatgattccttgctgggtcgctctggatcatacagttacttagaagaaagaaaaccttacagcagcaggctagaaaaggatgactcaactgactttaaaaagctttatgaacaaattctagctgaaaatgaaaagctgaaggcacagctacatgatacaaatatggaactaacagatcttaaattacagttggaaaaggccacccagagacaagaaagatttgctgatagatcactgttggaaatggaaaaaagggaacgaagagctctagaaagaagaatatctgaaatggaagaagagctcaaaatgttaccagacctaaaagcagacaaccagaggctaaaggatgaaaatggggccttgatcagagttataagcaaactttccaaataaaaaaaaaaaaagcagcaagtaatggaattgcacatattagtaacccagtggaccataattggcagtcactggaagtctgggaagaatccttggagactgtcattttcggatatcctgccaaatgccctcttatctagaatttttgtttcattttgtttaattttctggggtgtttttgttgttgttggtttgttttttgtttttttttttaatcaagaccattgtttcatgttaatgcagctgctgagaagatttttttttaatgactgagaaaacttgtttacagctccagcatataaggaaagtgttcaaggccagatatgcctcagatatttaaccagtaagccttagttgtacataaatacttttgtgtcaacaaaaactttcagctctcacagaagacagttactcaacattttttgatgtgccacagtttcgagtttttcgatatttaaattttttggcttttcatctaagtttgggtttgtattttttccttctaaactcttcatgtggcagagtcttctatgttttcacagctttttcattacagaaaagaacacttgctcttctgtgattattgtcatgtattaggctaatgctgtgttgtctcccacctggaactgaattgcttggtggaacatatgctttcactgtttgtgcaatatgcatttatttcttatatgaatgctttaaagtcatttgaggttagatcttttaattcctattttctgcttcattggtcactttttttttattgtagtataagatgttagattctgtaatcttcacattcattttagcaggtactgagtgatgctgtatatacaaataagtgtattgttttgatttttagaccaccacatggcatgcttgactatttcttatttcaaatgtctgctaatgcagagtaggctactccatgatagtgttaaaaaacaaaatttgctaacaatgtgatataaagactttaaaagttacacattatgtggagccctatctttacaaaagtttcctactgtaaagtgcttttattttcagttttcayttgatagtactcaaccataattaaagttgcataagataattgctttacatttcacatacctatatttatctgagtgctgtctaaaactgttgtgctagccaaagtaatgctatgaaatcatttgcagaattaacccgtgagttaatgttaaatgcactgttattgccatgtgaagaggcatcgactttgataccaccatcatgttcagaccattttatacatttcagtggcctttttttttttttaaggaaaaaaaagcgcaaaaccaagtacatagtgacgatggcttttatttggacaaatagcttttatattttcattaaaccatgcaaaaaatactacatctttctggcacataactgtctccttaaccactgaacagttcagccatttgaataaattgtacattgtaaagcttatagtagctgattgtattattgattgtattgtatactatattaaatgtgaatttgtaccccttcattttaaaaggtcattgtgttctactgcctattttagattactttggggttggggaagggtgttttggtaagcaggattttaagtcctctctctctcgattggttttatgaagatataaggttatgctcttactaccaagctcaggattcttgattttaaaggtacaaggatagttgtgggagttttatttttggttatatttgaactgtatgaatggtaggtctgaatattgagaatttccatggtcttatgtggaggtaaaatatacagataactgatcagtttgagtgactgcaacatgttctggttgcacaacagttaggcatgctatggtttatatttgtgaagtttggatgcctgtgaagaatgattaaatacatgtttctaatattttagtgttttgtatttaggttatttattctttgtatctaaaactgaacagctactgtgctatattgattttattggtagtattgagcagaccttgtttctgcatgaaactagttgcaaaacccactattttggaaataaaaatgtattttgacatatacaaataaaatgaataaaactattttaaatgtgtgaacttttaatgaagacattttaaattttgttctgagatatttaaattctgcatgggtattttttcactaattgctttacttggataccaatttgaataatttctgaaattgtaatattgtgataatttgcacagcattgtacatgcacatctgtaaatgcaatcttaattgccatatttatgcaatctgtgtaccaatttggacaaatgtttatatattttacataaagctstctgtatgcagaa

SEQ ID NO: 203 - DNA, 6016 bp, Homo sapiens
ccaaactgctacatttcagccatgtttgtggcacagctatgtttggctactgggagtcccaggcttatgttccagcctccatgaagcagccattcattttgagatcctgtcacattctggctacttccagagatctgtgagcaaatccctgctgttcaagagaccaacagacttctctctcattcttttgagccttggtgtcacttattattctcagtgaaatccttctttcccatggaagcacccaaagatggcttgggtgaacccctctgcttggttccaccctaaaaactcaccttgtaatccagaggcaaggcaaagattagatgctatgatctagaaatcaggattgatctagcaatggagtctgaagcaagttagggtggttccatgttggttctggtcaactccctggcattaaaaccctcggccacacagaccccacttttaaaaggttattaattctgacatgcccaagttcatctgagttccttagaaagatcaaccagcagcacctacttcacgacctatcctccattccattcaaataacgcggccaataggaaaatcctccgccctgagccaacgactcggcgtagctgagacagcmcgggaggcagatctgccctgtagagccttgcggttccactgctggcctccggattcccgggagcccccagcccgacaggacaaccttccttccccgcttcctcctttccagacccggcggcaggagaggggatgaagatggcggacgcgaagcagaagcggaacgagcagctgaaacgctggatcggctccgagacggacctcgagcctccggtggtgaagcgccagaagaccaaggtgaagttcgacgatggcgccgtcttcctggctgcttgctccagcggcgacacggacgaggtcctcaagctgctgcaccgcggcgccgacatcaattacgccaatgtggacggactcactgccctgcaccaggcttgcattgatgacaatgttgatatggtgaagtttctggtagaaaatggagcaaatattaatcaacctgataatgaaggctggataccactacatgcagcagcttcctgtggatatcttgatattgcagagtttttgattggtcaaggagcacatgtaggggctgtcaacagtgaaggagatacacctttagatattgcggaggaggaggcaatggaagagctacttcaaaatgaagttaatcggcaaggggttgatatagaagcagctcgaaaggaagaagaacggatcatgcttagagatgccaggcagtggctaaatagtggtcatataaatgatgtccggcatgcaaaatctggaggtacagcacttcacgttgcagctgctaaaggctatacggaagttttaaaacttttaatacaggcaggctatgatgttaatattaaagactatgatggctggacacctcttcatgctgcagctcattggggtaaagaagaagcatgtcgaattttagtggacaatctgtgtgatatggagatggtcaacaaagtgggccaaacagcctttgatgtagcagatgaagacattttaggatatttagaagagttgcaaaagaaacaaaatctgctccatagtgaaaaacgggacaagaaatctccactaattgaatcamcagcaaatatggacaataatcagtcacagaagacctttaaaaacaaagagacgttgattattgaaccagagaaaaatgcatcccgtattgaatctctggaacaagaaaaggttgatgaagaagaagaaggaaagaaggatgagtctagctgctctagtgaagaagatgaggaagatgactcggaatcagaagctgaaacagataagacaaaacccctggcttctgtaactaatgccaacacttctagtacacaagcagctcctgtagctgttacaacacctactgtgtcatcaggtcaagcaacacctacatcacctattaaaaagtttccaaccacagctacaaaaatttctcccaaagaagaagagagaaaagatgagtctcctgcaacttggaggttaggacttagaaagacgggcagctatggtgcacttgctgaaatcacagcatctaaagagggtcagaaagaaaaagatactgcaggtgttacacgttcagcttcaagtcccagactttcctcctctttggataataaagaaaaggagaaagatagtaaaggaactaggcttgcatatgttgcacctacaataccaagacgactagccagtacatctgacattgaagagaaagaaaacagagattcttcaagtttgcgaacaagtagttcatatacaaggagaaaatgggaagatgatcttaaaaaaaatagctcagttaatgaaggatcarcgtatcataaaagttgctcctttggtagaagacaagatgatttgattagttctagtgttccaagcaccacatcaacaccaacagttacctctgcagctgggcttcagaaaagcctgctttccagcacaagcactactacaaagattacaacgggttcttcctcagcaggcacacaaagcagtacctcaaatcgtttgtgggctgaggatagtactgagaaagaaaaggacagtgttcctacggcagtgaccattcctgttgctccaactgttgtaaatgctgcagcttctaccacaaccctgactacaactactgctggcactgtctcctccacaacagaggtcagggagagacgcagatcatacctcactcctgttagggatgaagagtctgaatcccaaagaaaagcaagatctagacaagcaagacaatctagaagatcaacacagggagtgacattaactgatcttcaagaagctgagaaaacaataggaagaagtcgttctacccgaaccagagaacaagaaaatgaagaaaaagaaaaagaggaaaaagagaaacaagataaagagaaacaagaagaaaagaaggagtcagaaacatctagagaagatgaatataaacaaaagtactccagaacgtatgatgagacttaccagcgttataggccagtatcaacttcaagttcaaccactccatcctcttcactttctactatgagcagttcactstatgcttcaagtcaactaaacaggccaaatagtcttgtaggcataacttctgcttactccagaggaataacaaaagaaaatgaaagagagggagaaaaaagagaagaggagaaagaaggagaagataaatcacaacctaaatcaatcagagaacgacgacgaccaagagagaaaagaagatctacaggagtttcattttggacacaagatagtgatgaaaatgaacaagaacaacaatcagacacagaagagggatccaataagaaagaaactcagacggattccatttctagatatgaaaccagttctacatcagctggtgatcgatatgattccttgctgggtcgctctggatcatacagttacttagaagaaagaaaaccttacagcagcaggctagaaaaggatgactcaactgactttaaaaagctttatgaacaaattctagctgaaaatgaaaagctgaaggcacagctacatgatacaaatatggaactaacagatcttaaattacagttggaaaaggccacccagagacaagaaagatttgctgatagatcactgttggaaatggaaaaaagggaacgaagagctctagaaagaagaatatctgaaatggaagaagagctcaaaatgttaccagacctaaaagcagacaaccagaggctaaaggatgaaaatggggccttgatcagagttataagcaaactttccaaataaaaaaaaaaaaagcagcaagtaatggaattgcacatattagtaacccagtggaccataattggcagtcactggaagtctgggaagaatccttggagactgtcattttcggatatcctgccaaatgccctcttatctagaatttttgtttcattttgtttaattttctggggtgtttttgttgttgttggtttgttttttgtttttttttttaatcaagaccattgtttcatgttaatgcagctgctgagaagatttttttttaatgactgagaaaacttgtttacagctccagcatataaggaaagtgttcaaggccagatatgcctcagatatttaaccagtaagccttagttgtacataaatacttttgtgtcaacaaaaactttcagctctcacagaagacagttactcaacattttttgatgtgccacagtttcgagtttttcgatatttaaattttttggcttttcatctaagtttgggtttgtattttttccttctaaactcttcatgtggcagagtcttctatgttttcacagctttttcattacagaaaagaacacttgctcttctgtgattattgtcatgtattaggctaatgctgtgttgtctcccacctggaactgaattgcttggtggaacatatgctttcactgtttgtgcaatatgcatttatttcttatatgaatgctttaaagtcatttgaggttagatcttttaattcctattttctgcttcattggtcactttttttttattgtagtataagatgttagattctgtaatcttcacattcattttagcaggtactgagtgatgctgtatatacaaataagtgtattgttttgatttttagaccaccacatggcatgcttgactatttcttatttcaaatgtctgctaatgcagagtaggctactccatgatagtgttaaaaaacaaaatttgctaacaatgtgatataaagactttaaaagttacacattatgtggagccctatctttacaaaagtttcctactgtaaagtgcttttattttcagttttcayttgatagtactcaaccataattaaagttgcataagataattgctttacatttcacatacctatatttatctgagtgctgtctaaaactgttgtgctagccaaagtaatgctatgaaatcatttgcagaattaacccgtgagttaatgttaaatgcactgttattgccatgtgaagaggcatcgactttgataccaccatcatgttcagaccattttatacatttcagtggcctttttttttttttaaggaaaaaaaagcgcaaaaccaagtacatagtgacgatggcttttatttggacaaatagcttttatattttcattaaaccatgcaaaaaatactacatctttctggcacataactgtctccttaaccactgaacagttcataagtcctctctctctcgattggttttatgaagatataaggttatgctcttactaccaagctcaggattcttgattttaaaggtacaaggatagttgtgggagttttatttttggttatatttgaactgtatgaatggtaggtctgaatattgagaatttccatggtcttatgtggaggtaaaatatacagataactgatcagtttgagtgactgcaacatgttctggttgcacaacagttaggcatgctatggtttatatttgtgaagtttggatgcctgtgaagaatgattaaatacatgtttctaatattttagtgttttgtatttaggttatttattctttgtatctaaaactgaacagctactgtgctatattgattttattggtagtattgagcagaccttgtttctgcatgaaactagttgcaaaacccactattttggaaataaaaatgtattttgacatatacaaataaaatgaataaaactattttaaatgtgtgaacttttaatgaagacattttaaattttgttctgagatatttaaattctgcatgggtattttttcactaattgctttacttggataccaatttgaataatttctgaaattgtaatattgtgataatttgcacagcattgtacatgcacatctgtaaatgcaatcttaattgccatatttatgcaatctgtgtaccaatttggacaaatgtttatatattttacataaagctstctgtatgcag

SEQ ID NO: 204 - DNA, 5704 bp, Homo sapiens
ccgccggtgacgggtggccgtgctgggggcgggagggcttctgtggtaggaagggaggtccgctcggccgggtgcgccgccccagtgctctgtgggatactggaagtctcgagygtcggctccgggttcccagccctcctctggcccgcactcatagaaacattcacacaccccctgcctcccctctcttccctctccgcctcccccttccccccctcgcgataagaagacccggcggcaggagaggggatgaagatggcggacgcgaagcagaagcggaacgagcagctgaaacgctggatcggctccgagacggacctcgagcctccggtggtgaagcgccagaagaccaaggtgaagttcgacgatggcgccgtcttcctggctgcttgctccagcggcgacacggacgaggtcctcaagctgctgcaccgcggcgccgacatcaattacgccaatgtggacggactcactgccctgcaccaggcttgcattgatgacaatgttgatatggtgaagtttctggtagaaaatggagcaaatattaatcaacctgataatgaaggctggataccactacatgcagcagcttcctgtggatatcttgatattgcagagtttttgattggtcaaggagcacatgtaggggctgtcaacagtgaaggagatacacctttagatattgcggaggaggaggcaatggaagagctacttcaaaatgaagttaatcggcaaggggttgatatagaagcagctcgaaaggaagaagaacggatcatgcttagagatgccaggcagtggctaaatagtggtcatataaatgatgtccggcatgcaaaatctggaggtacagcacttcacgttgcagctgctaaaggctatacggaagttttaaaacttttaatacaggcaggctatgatgttaatattaaagactatgatggctggacacctcttcatgctgcagctcattggggtaaagaagaagcatgtcgaattttagtggacaatctgtgtgatatggagatggtcaacaaagtgggccaaacagcctttgatgtagcagatgaagacattttaggatatttagaagagttgcaaaagaaacaaaatctgctccatagtgaaaaacgggacaagaaatctccactaattgaatcamcagcaaatatggacaataatcagtcacagaagacctttaaaaacaaagagacgttgattattgaaccagagaaaaatgcatcccgtattgaatctctggaacaagaaaaggttgatgaagaagaagaaggaaagaaggatgagtctagctgctctagtgaagaagatgaggaagatgactcggaatcagaagctgaaacagataagacaaaacccctggcttctgtaactaatgccaacacttctagtacacaagcagctcctgtagctgttacaacacctactgtgtcatcaggtcaagcaacacctacatcacctattaaaaagtttccaaccacagctacaaaaatttctcccaaagaagaagagagaaaagatgagtctcctgcaacttggaggttaggacttagaaagacgggcagctatggtgcacttgctgaaatcacagcatctaaagagggtcagaaagaaaaagatactgcaggtgttacacgttcagcttcaagtcccagactttcctcctctttggataataaagaaaaggagaaagatagtaaaggaactaggcttgcatatgttgcacctacaataccaagacgactagccagtacatctgacattgaagagaaagaaaacagagattcttcaagtttgcgaacaagtagttcatatacaaggagaaaatgggaagatgatcttaaaaaaaatagctcagttaatgaaggatcarcgtatcataaaagttgctcctttggtagaagacaagatgatttgattagttctagtgttccaagcaccacatcaacaccaacagttacctctgcagctgggcttcagaaaagcctgctttccagcacaagcactactacaaagattacaacgggttcttcctcagcaggcacacaaagcagtacctcaaatcgtttgtgggctgaggatagtactgagaaagaaaaggacagtgttcctacggcagtgaccattcctgttgctccaactgttgtaaatgctgcagcttctaccacaaccctgactacaactactgctggcactgtctcctccacaacagaggtcagggagagacgcagatcatacctcactcctgttagggatgaagagtctgaatcccaaagaaaagcaagatctagacaagcaagacaatctagaagatcaacacagggagtgacattaactgatcttcaagaagctgagaaaacaataggaagaagtcgttctacccgaaccagagaacaagaaaatgaagaaaaagaaaaagaggaaaaagagaaacaagataaagagaaacaagaagaaaagaaggagtcagaaacatctagagaagatgaatataaacaaaagtactccagaacgtatgatgagacttaccagcgttataggccagtatcaacttcaagttcaaccactccatcctcttcactttctactatgagcagttcactstatgcttcaagtcaactaaacaggccaaatagtcttgtaggcataacttctgcttactccagaggaataacaaaagaaaatgaaagagagggagaaaaaagagaagaggagaaagaaggagaagataaatcacaacctaaatcaatcagagaacgacgacgaccaagagagaaaagaagatctacaggagtttcattttggacacaagatagtgatgaaaatgaacaagaacaacaatcagacacagaagagggatccaataagaaagaaactcaggtaaataccattactttttatatgaaaccagttctacatcagctggtgatcgatatgattccttgctgggtcgctctggatcatacagttacttagaagaaagaaaaccttacagcagcaggctagaaaaggatgactcaactgactttaaaaagctttatgaacaaattctagctgaaaatgaaaagctgaaggcacagctacatgatacaaatatggaactaacagatcttaaattacagttggaaaaggccacccagagacaagaaagatttgctgatagatcactgttggaaatggaaaaaagggaacgaagagctctagaaagaagaatatctgaaatggaagaagagctcaaaatgttaccagacctaaaagcagacaaccagaggctaaaggatgaaaatggggccttgatcagagttataagcaaactttccaaataaaaaaaaaaaaagcagcaagtaatggaattgcacatattagtaacccagtggaccataattggcagtcactggaagtctgggaagaatccttggagactgtcattttcggatatcctgccaaatgccctcttatctagaatttttgtttcattttgtttaattttctggggtgtttttgttgttgttggtttgttttttgtttttttttttaatcaagaccattgtttcatgttaatgcagctgctgagaagatttttttttaatgactgagaaaacttgtttacagctccagcatataaggaaagtgttcaaggccagatatgcctcagatatttaaccagtaagccttagttgtacataaatacttttgtgtcaacaaaaactttcagctctcacagaagacagttactcaacattttttgatgtgccacagtttcgagtttttcgatatttaaattttttggcttttcatctaagtttgggtttgtattttttccttctaaactcttcatgtggcagagtcttctatgttttcacagctttttcattacagaaaagaacacttgctcttctgtgattattgtcatgtattaggctaatgctgtgttgtctcccacctggaactgaattgcttggtggaacatatgctttcactgtttgtgcaatatgcatttatttcttatatgaatgctttaaagtcatttgaggttagatcttttaattcctattttctgcttcattggtcactttttttttattgtagtataagatgttagattctgtaatcttcacattcattttagcaggtactgagtgatgctgtatatacaaataagtgtattgttttgatttttagaccaccacatggcatgcttgactatttcttatttcaaatgtctgctaatgcagagtaggctactccatgatagtgttaaaaaacaaaatttgctaacaatgtgatataaagactttaaaagttacacattatgtggagccctatctttacaaaagtttcctactgtaaagtgcttttattttcagttttcayttgatagtactcaaccataattaaagttgcataagataattgctttacatttcacatacctatatttatctgagtgctgtctaaaactgttgtgctagccaaagtaatgctatgaaatcatttgcagaattaacccgtgagttaatgttaaatgcactgttattgccatgtgaagaggcatcgactttgataccaccatcatgttcagaccattttatacatttcagtggcctttttttttttttaaggaaaaaaaagcgcaaaaccaagtacatagtgacgatggcttttatttggacaaatagcttttatattttcattaaaccatgcaaaaaatactacatctttctggcacataactgtctccttaaccactgaacagttcagccatttgaataaattgtacattgtaaagcttatagtagctgattgtattattgattgtattgtatactatattaaatgtgaatttgtaccccttcattttaaaaggtcattgtgttctactgcctattttagattactttggggttggggaagggtgttttggtaagcaggattttaagtcctctctctctcgattggttttatgaagatataaggttatgctcttactaccaagctcaggattcttgattttaaaggtacaaggatagttgtgggagttttatttttggttatatttgaactgtatgaatggtaggtctgaatattgagaatttccatggtcttatgtggaggtaaaatatacagataactgatcagtttgagtgactgcaacatgttctggttgcacaacagttaggcatgctatggtttatatttgtgaagtttggatgcctgtgaagaatgattaaatacatgtttctaatattttagtgttttgtatttaggttatttattctttgtatctaaaactgaacagctactgtgctatattgattttattggtagtattgagcagaccttgtttctgcatgaaactagttgcaaaacccactattttggaaataaaaatgtattttgacatatacaaataaaatgaataaaactattttaaatgtgtgaacttttaatgaagacattttaaattttgttctgagatatttaaattctgcatgggtattttttcactaattgctttacttggataccaatttgaataatttctgaaattgtaatattgtgataatttgcacagcattgtacatgcacatctgtaaatgcaatcttaattgccatatttatgcaatctgtgtaccaatttggacaaatgtttatatattttacataaagctstctgtatgcagaa

SEQ ID NO: 205 - DNA, 3591 bp, Homo sapiens
tggattcaaacctatgaaaattcctcaacttaagagtatttggacagatagcacagaagtcgtggcttttagaccttagcttttccctacyggctttctgtttgcattaagctrgtatttgacacttgatgtctagggattcttacctcctttggccaatggtacttcacacccatatgctagtccttttatgctaaatgtgggttttcctgttgttttccaggtacacagcttctcctagcatgacttcgatctgatcagcaaacaagaaaatttgtctcccgtagttctggggcgtgttcaccacctacaaccacagagctgtcatggctgccatctctacttccatccctgtaatttcacagccccagttcacagccatgaatgaaccacagtgcttctacaaygagtccattgccttcttttataaccgaagtggaaagcatcttgccacagaatggaacacagtcagcaagctggtgatgggacttggaatcactgtttgtatcttcatcatgttggccaacctattggtcatggtggcaatctatgtcaaccgccgcttccattttcctatttattacctaatggctaatctggctgctgcagacttctttgctgggttggcctacttctatctcatgttcaacacaggacccaatactcggagactgactgtyagcacatggctcctkcgtcagggcctcattgacaccagcctgacggcatctgtggccaacttactggctattgcaatcgagaggcacattacggttttccgcatgcagctccacacacggatgagcaaccggcgggtagtggtggtcattgtggtcatctggactatggccatcgttatgggtgctatacccagtgtgggctggaactgtatctgtgatattgaaaattgttccaacatggcacccctctacagtgactcttacttagtcttctgggccattttcaacttggtgacctttgtggtaatggtggttctctatgctcacatctttggctatgttcgccagaggactatgagaatgtctcggcatagttctggaccccggcggaatcgggataccatgatgagtcttctgaagactgtggtcattgtgcttggggcctttatcatctgctggactcctggattggttttgttacttctagacgtgtgctgtccacagtgcgacgtgctggcctatgagaaattcttccttctccttgctgaattcaactctgccatgaaccccatcatttactcctaccgygacaaagaaatgagygccacctttaggcagatcctctgctgccagcgcagtgagaaccccaccggccccacagaargctcagaccgctcggcttcctccctcaaccacaccatcttggctggagttcacagcaatgaycactctgtggtttagaacggaaactgagatgaggaaccagccgtcctctcttgkaggataaacagcctccccctacccaattgccagggcaaggtggggtgtgagagaggagaaaagtcaactcatgtacttaaacactaaccaatgacagtatttgttcctggaccccacaagacttgatatatattgaaaattagcttatgtgacaaccctcatcttgatccccatcccttctgaaagtaggaagttgsagctcttgcaatggaattcaagaacagactctggagtgtccatttagactacactaactagacttttaaaagattttgtgtggtttggtgcaagtcagaataaattctggctagttgaatccacaacttcatttatatacaggcttcccttttttatttttaaaggatacgtttcacttaataaacacgtttatgcctatcagcatgtttgtgatggatgagactatggactgcttttaaactaccataattccattttttcccttacataggaaaactgtaagttggaattatcttttgtttagaaagcatgcatgtaatgtatgtatgcagtatgccttacttaaaaagattaaaaggatactaatgttaaatcttctaggaaatagaacctagacttcaaagccagtatttgtttaggtcatgaagcaaacaatgctctaatcacaatattaactgtttaattaaaatgttgtaacaagtataaaacagggaatgtaagtttattaccaaagtgatatgtattccaaaaaagtcatagaagatgaagcactataatattgttcccatatatttaaaatacccaagtacattctaattaccagtatatcagaggaaaattttcgtagtctttgtaaaataatatactcatcatagaaaacttgaaaaatrcagaaatgtataaaaaagcaaaaatgattactgataatatcacaacccagaagtaaccacctttaaaaagcaacccccatgtatgcctatatgtgtattgtatactttttttacataattggagtcatactgtaaacagttttataagtagatctttttcattgcaaaattgccacattttcttatggcattaaaaattttacaaaaacataattttaatggctatattatattccatttaatggatgcaactcagtttatttaaccattcccatgttgttaactatttaggttgtttctaattttsattattataaagttgcagaaatttggtgtacataaaactgtctccatataattgattattaggatatattcccatgaaggattctttttttaaaaaaatgtgaaatrtcatcttgtacttacacctttcatgmaaagggatttcctgcttttgtactgcatgggtggcagttgtgaggaaaagccagtcaaatgacctttttacaaaagaaatgcagtggtcacttcagttgagagtgactttttaatacaacaagatcaactagaagaattcaactgtctcaagaatcaaggtaccccaatatatctcgcaattccaaactttgtttgagggactcgttatccagctcttggtagccacacctgcaatgtaaaatggaagaaaatgcaaagaaaccaaatgtgccgagtgaataaaggattgtcatatcaattagtgtgggtccatctgtagcaaatgggttgagtgtgtcagtatgtggttggttactgtgtattcgccaggaatcaccccgataggctgccaccctattaggtgatacctgtttaatatgttgyccaggtagactagtagttgcatcagtttgctgtaacaagtaaccagtgaggtaacacagtggtgaagcaggtcaggggaggtcaggaggatgtctgagagaaagaagtccgggagatgaatggctgtctaggaaggaggatgtcagtgcacggttagtgtttgagcagagggcagacttgtaaagtacctgtagtgaaaagaatgtggggacccgattagcagaaaggtgtttgcacrtactttatacaaaatacagaatactttatattggaagtgaaagaaatgaacgtggacttttacacatgtgcatatttttctggaggctatatggattatttgaaatgaaaagcatactaattggactttaataaatcattttcaatcagcgtttggtaat

SEQ ID NO: 206 - DNA, 3368 bp, Homo sapiens
gtacacagcttctcctagcatgacttcgatctgatcagcaaacaagaaaatttgtctcccgtagttctggggcgtgttcaccacctacaaccacagagctgtcatggctgccatctctacttccatccctgtaatttcacagccccagttcacagccatgaatgaaccacagtgcttctacaaygagtccattgccttcttttataaccgaagtggaaagcatcttgccacagaatggaacacagtcagcaagctggtgatgggacttggaatcactgtttgtatcttcatcatgttggccaacctattggtcatggtggcaatctatgtcaaccgccgcttccattttcctatttattacctaatggctaatctggctgctgcagacttctttgctgggttggcctacttctatctcatgttcaacacaggacccaatactcggagactgactgtyagcacatggctcctkcgtcagggcctcattgacaccagcctgacggcatctgtggccaacttactggctattgcaatcgagaggcacattacggttttccgcatgcagctccacacacggatgagcaaccggcgggtagtggtggtcattgtggtcatctggactatggccatcgttatgggtgctatacccagtgtgggctggaactgtatctgtgatattgaaaattgttccaacatggcacccctctacagtgactcttacttagtcttctgggccattttcaacttggtgacctttgtggtaatggtggttctctatgctcacatctttggctatgttcgccagaggactatgagaatgtctcggcatagttctggaccccggcggaatcgggataccatgatgagtcttctgaagactgtggtcattgtgcttggggcctttatcatctgctggactcctggattggttttgttacttctagacgtgtgctgtccacagtgcgacgtgctggcctatgagaaattcttccttctccttgctgaattcaactctgccatgaaccccatcatttactcctaccgygacaaagaaatgagygccacctttaggcagatcctctgctgccagcgcagtgagaaccccaccggccccacagaargctcagaccgctcggcttcctccctcaaccacaccatcttggctggagttcacagcaatgaycactctgtggtttagaacggaaactgagatgaggaaccagccgtcctctcttgkaggataaacagcctccccctacccaattgccagggcaaggtggggtgtgagagaggagaaaagtcaactcatgtacttaaacactaaccaatgacagtatttgttcctggaccccacaagacttgatatatattgaaaattagcttatgtgacaaccctcatcttgatccccatcccttctgaaagtaggaagttgsagctcttgcaatggaattcaagaacagactctggagtgtccatttagactacactaactagacttttaaaagattttgtgtggtttggtgcaagtcagaataaattctggctagttgaatccacaacttcatttatatacaggcttcccttttttatttttaaaggatacgtttcacttaataaacacgtttatgcctatcagcatgtttgtgatggatgagactatggactgcttttaaactaccataattccattttttcccttacataggaaaactgtaagttggaattatcttttgtttagaaagcatgcatgtaatgtatgtatgcagtatgccttacttaaaaagattaaaaggatactaatgttaaatcttctaggaaatagaacctagacttcaaagccagtatttgtttaggtcatgaagcaaacaatgctctaatcacaatattaactgtttaattaaaatgttgtaacaagtataaaacagggaatgtaagtttattaccaaagtgatatgtattccaaaaaagtcatagaagatgaagcactataatattgttcccatatatttaaaatacccaagtacattctaattaccagtatatcagaggaaaattttcgtagtctttgtaaaataatatactcatcatagaaaacttgaaaaatrcagaaatgtataaaaaagcaaaaatgattactgataatatcacaacccagaagtaaccacctttaaaaagcaacccccatgtatgcctatatgtgtattgtatactttttttacataattggagtcatactgtaaacagttttataagtagatctttttcattgcaaaattgccacattttcttatggcattaaaaattttacaaaaacataattttaatggctatattatattccatttaatggatgcaactcagtttatttaaccattcccatgttgttaactatttaggttgtttctaattttsattattataaagttgcagaaatttggtgtacataaaactgtctccatataattgattattaggatatattcccatgaaggattctttttttaaaaaaatgtgaaatrtcatcttgtacttacacctttcatgmaaagggatttcctgcttttgtactgcatgggtggcagttgtgaggaaaagccagtcaaatgacctttttacaaaagaaatgcagtggtcacttcagttgagagtgactttttaatacaacaagatcaactagaagaattcaactgtctcaagaatcaaggtaccccaatatatctcgcaattccaaactttgtttgagggactcgttatccagctcttggtagccacacctgcaatgtaaaatggaagaaaatgcaaagaaaccaaatgtgccgagtgaataaaggattgtcatatcaattagtgtgggtccatctgtagcaaatgggttgagtgtgtcagtatgtggttggttactgtgtattcgccaggaatcaccccgataggctgccaccctattaggtgatacctgtttaatatgttgyccaggtagactagtagttgcatcagtttgctgtaacaagtaaccagtgaggtaacacagtggtgaagcaggtcaggggaggtcaggaggatgtctgagagaaagaagtccgggagatgaatggctgtctaggaaggaggatgtcagtgcacggttagtgtttgagcagagggcagacttgtaaagtacctgtagtgaaaagaatgtggggacccgattagcagaaaggtgtttgcacrtactttatacaaaatacagaatactttatattggaagtgaaagaaatgaacgtggacttttacacatgtgcatatttttctggaggctatatggattatttgaaatgaaaagcatactaattggactttaataaatcattttcaatcagcgtttggtaat

SEQ ID NO: 207 - DNA, 3446 bp, Homo sapiens
gtggacgtctgatttatgaagctccccatccacctatctgagtacctgacttctcaggactgacacctacagcatcaggtacacagcttctcctagcatgacttcgatctgatcagcaaacaagaaaatttgtctcccgtagttctggggcgtgttcaccacctacaaccacagagctgtcatggctgccatctctacttccatccctgtaatttcacagccccagttcacagccatgaatgaaccacagtgcttctacaaygagtccattgccttcttttataaccgaagtggaaagcatcttgccacagaatggaacacagtcagcaagctggtgatgggacttggaatcactgtttgtatcttcatcatgttggccaacctattggtcatggtggcaatctatgtcaaccgccgcttccattttcctatttattacctaatggctaatctggctgctgcagacttctttgctgggttggcctacttctatctcatgttcaacacaggacccaatactcggagactgactgtyagcacatggctcctkcgtcagggcctcattgacaccagcctgacggcatctgtggccaacttactggctattgcaatcgagaggcacattacggttttccgcatgcagctccacacacggatgagcaaccggcgggtagtggtggtcattgtggtcatctggactatggccatcgttatgggtgctatacccagtgtgggctggaactgtatctgtgatattgaaaattgttccaacatggcacccctctacagtgactcttacttagtcttctgggccattttcaacttggtgacctttgtggtaatggtggttctctatgctcacatctttggctatgttcgccagaggactatgagaatgtctcggcatagttctggaccccggcggaatcgggataccatgatgagtcttctgaagactgtggtcattgtgcttggggcctttatcatctgctggactcctggattggttttgttacttctagacgtgtgctgtccacagtgcgacgtgctggcctatgagaaattcttccttctccttgctgaattcaactctgccatgaaccccatcatttactcctaccgygacaaagaaatgagygccacctttaggcagatcctctgctgccagcgcagtgagaaccccaccggccccacagaargctcagaccgctcggcttcctccctcaaccacaccatcttggctggagttcacagcaatgaycactctgtggtttagaacggaaactgagatgaggaaccagccgtcctctcttgkaggataaacagcctccccctacccaattgccagggcaaggtggggtgtgagagaggagaaaagtcaactcatgtacttaaacactaaccaatgacagtatttgttcctggaccccacaagacttgatatatattgaaaattagcttatgtgacaaccctcatcttgatccccatcccttctgaaagtaggaagttgsagctcttgcaatggaattcaagaacagactctggagtgtccatttagactacactaactagacttttaaaagattttgtgtggtttggtgcaagtcagaataaattctggctagttgaatccacaacttcatttatatacaggcttcccttttttatttttaaaggatacgtttcacttaataaacacgtttatgcctatcagcatgtttgtgatggatgagactatggactgcttttaaactaccataattccattttttcccttacataggaaaactgtaagttggaattatcttttgtttagaaagcatgcatgtaatgtatgtatgcagtatgccttacttaaaaagattaaaaggatactaatgttaaatcttctaggaaatagaacctagacttcaaagccagtatttgtttaggtcatgaagcaaacaatgctctaatcacaatattaactgtttaattaaaatgttgtaacaagtataaaacagggaatgtaagtttattaccaaagtgatatgtattccaaaaaagtcatagaagatgaagcactataatattgttcccatatatttaaaatacccaagtacattctaattaccagtatatcagaggaaaattttcgtagtctttgtaaaataatatactcatcatagaaaacttgaaaaatrcagaaatgtataaaaaagcaaaaatgattactgataatatcacaacccagaagtaaccacctttaaaaagcaacccccatgtatgcctatatgtgtattgtatactttttttacataattggagtcatactgtaaacagttttataagtagatctttttcattgcaaaattgccacattttcttatggcattaaaaattttacaaaaacataattttaatggctatattatattccatttaatggatgcaactcagtttatttaaccattcccatgttgttaactatttaggttgtttctaattttsattattataaagttgcagaaatttggtgtacataaaactgtctccatataattgattattaggatatattcccatgaaggattctttttttaaaaaaatgtgaaatrtcatcttgtacttacacctttcatgmaaagggatttcctgcttttgtactgcatgggtggcagttgtgaggaaaagccagtcaaatgacctttttacaaaagaaatgcagtggtcacttcagttgagagtgactttttaatacaacaagatcaactagaagaattcaactgtctcaagaatcaaggtaccccaatatatctcgcaattccaaactttgtttgagggactcgttatccagctcttggtagccacacctgcaatgtaaaatggaagaaaatgcaaagaaaccaaatgtgccgagtgaataaaggattgtcatatcaattagtgtgggtccatctgtagcaaatgggttgagtgtgtcagtatgtggttggttactgtgtattcgccaggaatcaccccgataggctgccaccctattaggtgatacctgtttaatatgttgyccaggtagactagtagttgcatcagtttgctgtaacaagtaaccagtgaggtaacacagtggtgaagcaggtcaggggaggtcaggaggatgtctgagagaaagaagtccgggagatgaatggctgtctaggaaggaggatgtcagtgcacggttagtgtttgagcagagggcagacttgtaaagtacctgtagtgaaaagaatgtggggacccgattagcagaaaggtgtttgcacrtactttatacaaaatacagaatactttatattggaagtgaaagaaatgaacgtggacttttacacatgtgcatatttttctggaggctatatggattatttgaaatgaaaagcatactaattggactttaataaatcattttcaatcagcgtttggtaat

SEQ ID NO: 208 - DNA, 3394 bp, Homo sapiens
cctgaagccagcccgggggcggcaggagagggacgcgcggcggcagcgagcgcaggtggacgtctgatttatgaagctccccatccacctatctgagtacctgacttctcaggactgacacctacagcatcaggtacacagcttctcctagcatgacttcgatctgatcagcaaacaagaaaatttgtctcccgtagttctggggcgtgttcaccacctacaaccacagagctgtcatggctgccatctctacttccatccctgtaatttcacagccccagttcacagccatgaatgaaccacagtgcttctacaaygagtccattgccttcttttataaccgaagtggaaagcatcttgccacagaatggaacacagtcagcaagctggtgatgggacttggaatcactgtttgtatcttcatcatgttggccaacctattggtcatggtggcaatctatgtcaaccgccgcttccattttcctatttattacctaatggctaatctggctgctgcagacttctttgctgggttggcctacttctatctcatgttcaacacaggacccaatactcggagactgactgtyagcacatggctcctkcgtcagggcctcattgacaccagcctgacggcatctgtggccaacttactggctattgcaatcgagaggcacattacggttttccgcatgcagctccacacacggatgagcaaccggcgggtagtggtggtcattgtggtcatctggactatggccatcgttatgggtgctatacccagtgtgggctggaactgtatctgtgatattgaaaattgttccaacatggcacccctctacagtgactcttacttagtcttctgggccattttcaacttggtgacctttgtggtaatggtggttctctatgctcacatctttggctatgttcgccagaggactatgagaatgtctcggcatagttctggaccccggcggaatcgggataccatgatgagtcttctgaagactgtggtcattgtgcttggggcctttatcatctgctggactcctggattggttttgttacttctagacgtgtgctgtccacagtgcgacgtgctggcctatgagaaattcttccttctccttgctgaattcaactctgccatgaaccccatcatttactcctaccgygacaaagaaatgagygccacctttaggcagatcctctgctgccagcgcagtgagaaccccaccggccccacagaargctcagaccgctcggcttcctccctcaaccacaccatcttggctggagttcacagcaatgaycactctgtggtttagaacggaaactgagatgaggaaccagccgtcctctcttgkaggataaacagcctccccctacccaattgccagggcaaggtggggtgtgagagaggagaaaagtcaactcatgtacttaaacactaaccaatgacagtatttgttcctggaccccacaagacttgatatatattgaaaattagcttatgtgacaaccctcatcttgatccccatcccttctgaaagtaggaagttgsagctcttgcaatggaattcaagaacagactctggagtgtccatttagactacactaactagacttttaaaagattttgtgtggtttggtgcaagtcagaataaattctggctagttgaatccacaacttcatttatatacaggcttcccttttttatttttaaaggatacgtttcacttaataaacacgtttatgcctatcagcatgtttgtgatggatgagactatggactgcttttaaactaccataattccattttttcccttacataggaaaactgtaagttggaattatcttttgtttagaaagcatgcatgtaatgtatgtatgcagtatgccttacttaaaaagattaaaaggatactaatgttaaatcttctaggaaatagaacctagacttcaaagccagtatttgtttaggtcatgaagcaaacaatgctctaatcacaatattaactgtttaattaaaatgttgtaacaagtataaaacagggaatgtaagtttattaccaaagtgatatgtattccaaaaaagtcatagaagatgaagcactataatattgttcccatatatttaaaatacccaagtacattctaattaccagtatatcagaggaaaattttcgtagtctttgtaaaataatatactcatcatagaaaacttgaaaaatrcagaaatgtataaaaaagcaaaaatgattactgataatatcacaacccagaagtaaccacctttaaaaagcaacccccatgtatgcctatatgtgtattgtatactttttttacataattggagtcatactgtaaacagttttataagtagatctttttcattgcaaaattgccacattttcttatggcattaaaaattttacaaaaacataattttaatggctatattatattccatttaatggatgcaactcagtttatttaaccattcccatgttgttaactatttaggttgtttctaattttsattattataaagttgcagaaatttggtgtacataaaactgtctccatataattgattattaggatatattcccatgaaggattctttttttaaaaaaatgtgaaatrtcatcttgtacttacacctttcatgmaaagggatttcctgcttttgtactgcatgggtggcagttgtgaggaaaagccagtcaaatgacctttttacaaaagaaatgcagtggtcacttcagttgagagtgactttttaatacaacaagatcaactagaagaattcaactgtctcaagaatcaaggtaccccaatatatctcgcaattccaaactttgtttgagggactcgttatccagctcttggtagccacacctgcaatgtaaaatggaagaaaatgcaaagaaaccaaatgtgccgagtgaataaaggattgtcatatcaattagtgtgggtccatctgtagcaaatgggttgagtgtgtcagtatgtggttggttactgtgtattcgccaggaatcaccccgataggctgccaccctattaggtgatacctgtttaatatgttgyccaggtagactagtagttgcatcagtttgctgtaacaagtaaccagtgaggtaacacagtggtgaagcaggtcaggggaggtcaggaggatgtctgagagaaagaagtccgggagatgaatggctgtctaggaaggaggatgtcagtgcacggttagtgtttgagcagagggcagacttgtaaagtacctgtagtgaaaagaatgtggggacccgattagcagaaagaaatgaacgtggacttttacacatgtgcatatttttctggaggctatatggattatttgaaatg

SEQ ID NO: 209 - DNA, 3501 bp, Homo sapiens
cctgaagccagcccgggggcggcaggagagggacgcgcggcggcagcgagcgcaggtggacgtctgatttatgaagctccccatccacctatctgagtacctgacttctcaggactgacacctacagcatcaggtacacagcttctcctagcatgacttcgatctgatcagcaaacaagaaaatttgtctcccgtagttctggggcgtgttcaccacctacaaccacagagctgtcatggctgccatctctacttccatccctgtaatttcacagccccagttcacagccatgaatgaaccacagtgcttctacaaygagtccattgccttcttttataaccgaagtggaaagcatcttgccacagaatggaacacagtcagcaagctggtgatgggacttggaatcactgtttgtatcttcatcatgttggccaacctattggtcatggtggcaatctatgtcaaccgccgcttccattttcctatttattacctaatggctaatctggctgctgcagacttctttgctgggttggcctacttctatctcatgttcaacacaggacccaatactcggagactgactgtyagcacatggctcctkcgtcagggcctcattgacaccagcctgacggcatctgtggccaacttactggctattgcaatcgagaggcacattacggttttccgcatgcagctccacacacggatgagcaaccggcgggtagtggtggtcattgtggtcatctggactatggccatcgttatgggtgctatacccagtgtgggctggaactgtatctgtgatattgaaaattgttccaacatggcacccctctacagtgactcttacttagtcttctgggccattttcaacttggtgacctttgtggtaatggtggttctctatgctcacatctttggctatgttcgccagaggactatgagaatgtctcggcatagttctggaccccggcggaatcgggataccatgatgagtcttctgaagactgtggtcattgtgcttggggcctttatcatctgctggactcctggattggttttgttacttctagacgtgtgctgtccacagtgcgacgtgctggcctatgagaaattcttccttctccttgctgaattcaactctgccatgaaccccatcatttactcctaccgygacaaagaaatgagygccacctttaggcagatcctctgctgccagcgcagtgagaaccccaccggccccacagaargctcagaccgctcggcttcctccctcaaccacaccatcttggctggagttcacagcaatgaycactctgtggtttagaacggaaactgagatgaggaaccagccgtcctctcttgkaggataaacagcctccccctacccaattgccagggcaaggtggggtgtgagagaggagaaaagtcaactcatgtacttaaacactaaccaatgacagtatttgttcctggaccccacaagacttgatatatattgaaaattagcttatgtgacaaccctcatcttgatccccatcccttctgaaagtaggaagttgsagctcttgcaatggaattcaagaacagactctggagtgtccatttagactacactaactagacttttaaaagattttgtgtggtttggtgcaagtcagaataaattctggctagttgaatccacaacttcatttatatacaggcttcccttttttatttttaaaggatacgtttcacttaataaacacgtttatgcctatcagcatgtttgtgatggatgagactatggactgcttttaaactaccataattccattttttcccttacataggaaaactgtaagttggaattatcttttgtttagaaagcatgcatgtaatgtatgtatgcagtatgccttacttaaaaagattaaaaggatactaatgttaaatcttctaggaaatagaacctagacttcaaagccagtatttgtttaggtcatgaagcaaacaatgctctaatcacaatattaactgtttaattaaaatgttgtaacaagtataaaacagggaatgtaagtttattaccaaagtgatatgtattccaaaaaagtcatagaagatgaagcactataatattgttcccatatatttaaaatacccaagtacattctaattaccagtatatcagaggaaaattttcgtagtctttgtaaaataatatactcatcatagaaaacttgaaaaatrcagaaatgtataaaaaagcaaaaatgattactgataatatcacaacccagaagtaaccacctttaaaaagcaacccccatgtatgcctatatgtgtattgtatactttttttacataattggagtcatactgtaaacagttttataagtagatctttttcattgcaaaattgccacattttcttatggcattaaaaattttacaaaaacataattttaatggctatattatattccatttaatggatgcaactcagtttatttaaccattcccatgttgttaactatttaggttgtttctaattttsattattataaagttgcagaaatttggtgtacataaaactgtctccatataattgattattaggatatattcccatgaaggattctttttttaaaaaaatgtgaaatrtcatcttgtacttacacctttcatgmaaagggatttcctgcttttgtactgcatgggtggcagttgtgaggaaaagccagtcaaatgacctttttacaaaagaaatgcagtggtcacttcagttgagagtgactttttaatacaacaagatcaactagaagaattcaactgtctcaagaatcaaggtaccccaatatatctcgcaattccaaactttgtttgagggactcgttatccagctcttggtagccacacctgcaatgtaaaatggaagaaaatgcaaagaaaccaaatgtgccgagtgaataaaggattgtcatatcaattagtgtgggtccatctgtagcaaatgggttgagtgtgtcagtatgtggttggttactgtgtattcgccaggaatcaccccgataggctgccaccctattaggtgatacctgtttaatatgttgyccaggtagactagtagttgcatcagtttgctgtaacaagtaaccagtgaggtaacacagtggtgaagcaggtcaggggaggtcaggaggatgtctgagagaaagaagtccgggagatgaatggctgtctaggaaggaggatgtcagtgcacggttagtgtttgagcagagggcagacttgtaaagtacctgtagtgaaaagaatgtggggacccgattagcagaaaggtgtttgcacrtactttatacaaaatacagaatactttatattggaagtgaaagaaatgaacgtggacttttacacatgtgcatatttttctggaggctatatggattatttgaaatgaaaagcatactaattggactttaataaatcattttcaatcagcgtttggtaat

SEQ ID NO: 210 - DNA, 2570 bp, Homo sapiens
gacatgccccgcggcgcgccattaaccgccagatttgaatcgcsggacccgttggcagaggtggcggcggcggcatgggtgccccgacgttgccccctgcctggcagccctttctcaaggaccaccgcatctctacattcaagaactggcccttcttggagggctgcgcctgcaccccggagcggatggccgaggctggcttcatccactgccccactgagaacgagccagacttggcccagtgtttcttctgcttcaaggagctggaaggctgggagccagatgacgaccccatagaggaacataaaaagcattcgtccggttgcgctttcctttctgtcaagaagcagtttgaagaattaacccttggtgaatttttgaaactggacagagaaagagccaagaacaaaattgcaaaggaaaccaacaataagaagaaagaatttgaggaaactgcgragaaagtgcgccgtgccatcgagcagctggctgccatggattgaggcctctggccggagctgcctggtcccagagtggctgcaccacttccagggtttattccctggtgccaccagccttcctgtgggccccttagcaatgtcttagraaaggagatcaacattttcaaattagatgtttcaactgtgctcytgttttgtcttgaaagtggcaccagaggtgcttctgcctgtgcagcgggtgctgctggtaacagtggctgcttctctctctctctctcttttttgggggctcatttttgctgttttgattcccgggcttaccaggtgagaagtgagggaggaagaaggcagtgtcccttttgctagagctgacagctttgttcgcgtgggcagagccttccacagtgaatgtgtctggacctcatgttgttgaggctgtcacagtcctgagtgtggacttggcaggtgcctgttgaatctgagctgcaggttccttatctgtcacacctgtgcctcctcagaggacatgtttttttgtttttttttttttggtagatgcatgacttgtgtgtgatgagagaatggagacagagtcccyggctcctctactgtttaacaacatggctttcttattttgtttgaattgttaattcacagaatagcacaaactacaattaaaactaagcacaaagccattctaagtcattggggaaacggggtgaacttcaggtggatgaggagacagaatagagtgataggaagcgtctggcagatactccttttgccactgctgtgtgattagacaggcccagtgagccgcggggcacatgctggccgctcctccctcagaaaaaggcagtggcctaaatcctttttaaatgacttggctcgatgctgtgggggactggctgggctgctgcaggccgtgtgtctgtcagcccaaccttcacatctgtcacgttctccacacgggggagagacgcagtccgcccaggtccccgctttctttggaggcagcagctcccgcagggctgaagtctggcgtaagatgatggatttgattcgccctcctccctgtcatagagctgcagggtggattgttacagcttcgctggaaacctctggaggtcatctcggctgttcctgagaaataaaaagcctgtcatttcaaacactgctgtggaccctactgggtttttaaaatattgtcagtttttcatcgtcgtccctagcctgccaacagccatctgcccagacagccgcagtgaggatgagcgtcctggcagagacgcagttgtctctgggcgcttgccagagccacgaaccccagacctgtttgtatcatccgggctccttccgggcagaaacaactgaaaatgcacttcagacccacttatttctgccacatctgagtcggcctgagatagacttttccctctaaactgggagaatatcacagtggtttttgttagcagaaaatgcactccagcctctgtactcatctaagctgcttatttttgatatttgtgtcagtctgtaaatggatacttcactttaataactgttgcttagtaattggctttgtagagaagctggaaaaaaatggttttgtcttcaactcctttgcatgccaggcggtgatgtggatctcggcttctgtgagcctgtgctgtgggcagggctgagctggagcmgcccctctcagcccgcctgccacggcctttccttaaaggccatccttaaaaccagaccctcatggctrccagcacctgaaagcttcctcgacatctgttaataaagccgtaggcccttgtctaagygcaaccgcctagactttctttcagatacatgtcyacatgtccatttttcaggttctctaagttggagtggagtctgggaagggttgtgaatgaggcttctgggctatgggtgaggttccaatggcaggttagagcccctcgggccaactgccatcctggaaagtagagacagcagtgcccgctgcccagaagagaccagcaagccaaactggagcccccattgcaggctgtcgccatgtggaaagagtaactcacaattgccaataaagtctcatgtggttttatctac

SEQ ID NO: 211 - DNA, 2654 bp, Homo sapiens
gacatgccccgcggcgcgccattaaccgccagatttgaatcgcsggacccgttggcagaggtggcggcggcggcatgggtgccccgacgttgccccctgcctggcagccctttctcaaggaccaccgcatctctacattcaagaactggcccttcttggagggctgcgcctgcaccccggagcggatggccgaggctggcttcatccactgccccactgagaacgagccagacttggcccagtgtttcttctgcttcaaggagctggaaggctgggagccagatgacgaccccattgggccgggcacggtggcttacgcctgtaataccagcactttgggaggccgaggcgggcggatcacgagagaggaacataaaaagcattcgtccggttgcgctttcctttctgtcaagaagcagtttgaagaattaacccttggtgaatttttgaaactggacagagaaagagccaagaacaaaattgcaaaggaaaccaacaataagaagaaagaatttgaggaaactgcgragaaagtgcgccgtgccatcgagcagctggctgccatggattgaggcctctggccggagctgcctggtcccagagtggctgcaccacttccagggtttattccctggtgccaccagccttcctgtgggccccttagcaatgtcttagraaaggagatcaacattttcaaattagatgtttcaactgtgctcytgttttgtcttgaaagtggcaccagaggtgcttctgcctgtgcagcgggtgctgctggtaacagtggctgcttctctctctctctctcttttttgggggctcatttttgctgttttgattcccgggcttaccaggtgagaagtgagggaggaagaaggcagtgtcccttttgctagagctgacagctttgttcgcgtgggcagagccttccacagtgaatgtgtctggacctcatgttgttgaggctgtcacagtcctgagtgtggacttggcaggtgcctgttgaatctgagctgcaggttccttatctgtcacacctgtgcctcctcagaggacagtttttttgttgttgtgtttttttgtttttttttttttggtagatgcatgacttgtgtgtgatgagagaatggagacagagtcccyggctcctctactgtttaacaacatggctttcttattttgtttgaattgttaattcacagaatagcacaaactacaattaaaactaagcacaaagccattctaagtcattggggaaacggggtgaacttcaggtggatgaggagacagaatagagtgataggaagcgtctggcagatactccttttgccactgctgtgtgattagacaggcccagtgagccgcggggcacatgctggccgctcctccctcagaaaaaggcagtggcctaaatcctttttaaatgacttggctcgatgctgtgggggactggctgggctgctgcaggccgtgtgtctgtcagcccaaccttcacatctgtcacgttctccacacgggggagagacgcagtccgcccaggtccccgctttctttggaggcagcagctcccgcagggctgaagtctggcgtaagatgatggatttgattcgccctcctccctgtcatagagctgcagggtggattgttacagcttcgctggaaacctctggaggtcatctcggctgttcctgagaaataaaaagcctgtcatttcaaacactgctgtggaccctactgggtttttaaaatattgtcagtttttcatcgtcgtccctagcctgccaacagccatctgcccagacagccgcagtgaggatgagcgtcctggcagagacgcagttgtctctgggcgcttgccagagccacgaaccccagacctgtttgtatcatccgggctccttccgggcagaaacaactgaaaatgcacttcagacccacttatttctgccacatctgagtcggcctgagatagacttttccctctaaactgggagaatatcacagtggtttttgttagcagaaaatgcactccagcctctgtactcatctaagctgcttatttttgatatttgtgtcagtctgtaaatggatacttcactttaataactgttgcttagtaattggctttgtagagaagctggaaaaaaatggttttgtcttcaactcctttgcatgccaggcggtgatgtggatctcggcttctgtgagcctgtgctgtgggcagggctgagctggagcmgcccctctcagcccgcctgccacggcctttccttaaaggccatccttaaaaccagaccctcatggctrccagcacctgaaagcttcctcgacatctgttaataaagccgtaggcccttgtctaagygcaaccgcctagactttctttcagatacatgtcyacatgtccatttttcaggttctctaagttggagtggagtctgggaagggttgtgaatgaggcttctgggctatgggtgaggttccaatggcaggttagagcccctcgggccaactgccatcctggaaagtagagacagcagtgcccgctgcccagaagagaccagcaagccaaactggagcccccattgcaggctgtcgccatgtggaaagagtaactcacaattgccaataaagtctcatgtggttttatctac

SEQ ID NO: 212 - DNA, 2452 bp, Homo sapiens
gacatgccccgcggcgcgccattaaccgccagatttgaatcgcsggacccgttggcagaggtggcggcggcggcatgggtgccccgacgttgccccctgcctggcagccctttctcaaggaccaccgcatctctacattcaagaactggcccttcttggagggctgcgcctgcaccccggagcggatggccgaggctggcttcatccactgccccactgagaacgagccagacttggcccagtgtttcttctgcttcaaggagctggaaggctgggagccagatgacgaccccatgcaaaggaaaccaacaataagaagaaagaatttgaggaaactgcgragaaagtgcgccgtgccatcgagcagctggctgccatggattgaggcctctggccggagctgcctggtcccagagtggctgcaccacttccagggtttattccctggtgccaccagccttcctgtgggccccttagcaatgtcttagraaaggagatcaacattttcaaattagatgtttcaactgtgctcytgttttgtcttgaaagtggcaccagaggtgcttctgcctgtgcagcgggtgctgctggtaacagtggctgcttctctctctctctctcttttttgggggctcatttttgctgttttgattcccgggcttaccaggtgagaagtgagggaggaagaaggcagtgtcccttttgctagagctgacagctttgttcgcgtgggcagagccttccacagtgaatgtgtctggacctcatgttgttgaggctgtcacagtcctgagtgtggacttggcaggtgcctgttgaatctgagctgcaggttccttatctgtcacacctgtgcctcctcagaggacatgtttttttgtttttttttttttggtagatgcatgacttgtgtgtgatgagagaatggagacagagtcccyggctcctctactgtttaacaacatggctttcttattttgtttgaattgttaattcacagaatagcacaaactacaattaaaactaagcacaaagccattctaagtcattggggaaacggggtgaacttcaggtggatgaggagacagaatagagtgataggaagcgtctggcagatactccttttgccactgctgtgtgattagacaggcccagtgagccgcggggcacatgctggccgctcctccctcagaaaaaggcagtggcctaaatcctttttaaatgacttggctcgatgctgtgggggactggctgggctgctgcaggccgtgtgtctgtcagcccaaccttcacatctgtcacgttctccacacgggggagagacgcagtccgcccaggtccccgctttctttggaggcagcagctcccgcagggctgaagtctggcgtaagatgatggatttgattcgccctcctccctgtcatagagctgcagggtggattgttacagcttcgctggaaacctctggaggtcatctcggctgttcctgagaaataaaaagcctgtcatttcaaacactgctgtggaccctactgggtttttaaaatattgtcagtttttcatcgtcgtccctagcctgccaacagccatctgcccagacagccgcagtgaggatgagcgtcctggcagagacgcagttgtctctgggcgcttgccagagccacgaaccccagacctgtttgtatcatccgggctccttccgggcagaaacaactgaaaatgcacttcagacccacttatttctgccacatctgagtcggcctgagatagacttttccctctaaactgggagaatatcacagtggtttttgttagcagaaaatgcactccagcctctgtactcatctaagctgcttatttttgatatttgtgtcagtctgtaaatggatacttcactttaataactgttgcttagtaattggctttgtagagaagctggaaaaaaatggttttgtcttcaactcctttgcatgccaggcggtgatgtggatctcggcttctgtgagcctgtgctgtgggcagggctgagctggagcmgcccctctcagcccgcctgccacggcctttccttaaaggccatccttaaaaccagaccctcatggctrccagcacctgaaagcttcctcgacatctgttaataaagccgtaggcccttgtctaagygcaaccgcctagactttctttcagatacatgtcyacatgtccatttttcaggttctctaagttggagtggagtctgggaagggttgtgaatgaggcttctgggctatgggtgaggttccaatggcaggttagagcccctcgggccaactgccatcctggaaagtagagacagcagtgcccgctgcccagaagagaccagcaagccaaactggagcccccattgcaggctgtcgccatgtggaaagagtaactcacaattgccaataaagtctcatgtggttttatctac

SEQ ID NO: 213 - DNA, 578 bp, Homo sapiens
gacatgccccgcggcgcgccattaaccgccagatttgaatcgcsggacccgttggcagaggtggcggcggcggcatgggtgccccgacgttgccccctgcctggcagccctttctcaaggaccaccgcatctctacattcaagaactggcccttcttggagggctgcgcctgcaccccggagcggatggccgaggctggcttcatccactgccccactgagaacgagccagacttggcccagtgtttcttctgcttcaaggagctggaaggctgggagccagatgacgaccccatagaggaacataaaaagcattcgtccggttgcgctttcctttctgtcaagaagcagtttgaagaattaacccttggtgaatttttgaaactggacagagaaagagccaagaacaaaattgagagagctctgttagcagaatgaaaaaattggaagccagattcagggagggactggaagcaaaagaatttctgttcgaggaagagcctgatgtttgccagggtctgtttaactggacatgaagaggaaggctctggactttcctccaggagtttcaggagaaag

SEQ ID NO: 214 - DNA, 2467 bp, Homo sapiens
gacatgccccgcggcgcgccattaaccgccagatttgaatcgcsggacccgttggcagaggtggcggcggcggcatgggtgccccgacgttgccccctgcctggcagccctttctcaaggaccaccgcatctctacattcaagaactggcccttcttggagggctgcgcctgcaccccggagcggatggccgaggctggcttcatccactgccccactgagaacgagccagacttggcccagtgtttcttctgcttcaaggagctggaaggctgggagccagatgacgaccccatgcaaaggaaaccaacaataagaagaaagaatttgaggaaactgcgragaaagtgcgccgtgccatcgagcagctggctgccatggattgaggcctctggccggagctgcctggtcccagagtggctgcaccacttccagggtttattccctggtgccaccagccttcctgtgggccccttagcaatgtcttagraaaggagatcaacattttcaaattagatgtttcaactgtgctcytgttttgtcttgaaagtggcaccagaggtgcttctgcctgtgcagcgggtgctgctggtaacagtggctgcttctctctctctctctcttttttgggggctcatttttgctgttttgattcccgggcttaccaggtgagaagtgagggaggaagaaggcagtgtcccttttgctagagctgacagctttgttcgcgtgggcagagccttccacagtgaatgtgtctggacctcatgttgttgaggctgtcacagtcctgagtgtggacttggcaggtgcctgttgaatctgagctgcaggttccttatctgtcacacctgtgcctcctcagaggacagtttttttgttgttgtgtttttttgtttttttttttttggtagatgcatgacttgtgtgtgatgagagaatggagacagagtcccyggctcctctactgtttaacaacatggctttcttattttgtttgaattgttaattcacagaatagcacaaactacaattaaaactaagcacaaagccattctaagtcattggggaaacggggtgaacttcaggtggatgaggagacagaatagagtgataggaagcgtctggcagatactccttttgccactgctgtgtgattagacaggcccagtgagccgcggggcacatgctggccgctcctccctcagaaaaaggcagtggcctaaatcctttttaaatgacttggctcgatgctgtgggggactggctgggctgctgcaggccgtgtgtctgtcagcccaaccttcacatctgtcacgttctccacacgggggagagacgcagtccgcccaggtccccgctttctttggaggcagcagctcccgcagggctgaagtctggcgtaagatgatggatttgattcgccctcctccctgtcatagagctgcagggtggattgttacagcttcgctggaaacctctggaggtcatctcggctgttcctgagaaataaaaagcctgtcatttcaaacactgctgtggaccctactgggtttttaaaatattgtcagtttttcatcgtcgtccctagcctgccaacagccatctgcccagacagccgcagtgaggatgagcgtcctggcagagacgcagttgtctctgggcgcttgccagagccacgaaccccagacctgtttgtatcatccgggctccttccgggcagaaacaactgaaaatgcacttcagacccacttatttctgccacatctgagtcggcctgagatagacttttccctctaaactgggagaatatcacagtggtttttgttagcagaaaatgcactccagcctctgtactcatctaagctgcttatttttgatatttgtgtcagtctgtaaatggatacttcactttaataactgttgcttagtaattggctttgtagagaagctggaaaaaaatggttttgtcttcaactcctttgcatgccaggcggtgatgtggatctcggcttctgtgagcctgtgctgtgggcagggctgagctggagcmgcccctctcagcccgcctgccacggcctttccttaaaggccatccttaaaaccagaccctcatggctrccagcacctgaaagcttcctcgacatctgttaataaagccgtaggcccttgtctaagygcaaccgcctagactttctttcagatacatgtcyacatgtccatttttcaggttctctaagttggagtggagtctgggaagggttgtgaatgaggcttctgggctatgggtgaggttccaatggcaggttagagcccctcgggccaactgccatcctggaaagtagagacagcagtgcccgctgcccagaagagaccagcaagccaaactggagcccccattgcaggctgtcgccatgtggaaagagtaactcacaattgccaataaagtctcatgtggttttatctac

SEQ ID NO: 215 - DNA, 2639 bp, Homo sapiens
gacatgccccgcggcgcgccattaaccgccagatttgaatcgcsggacccgttggcagaggtggcggcggcggcatgggtgccccgacgttgccccctgcctggcagccctttctcaaggaccaccgcatctctacattcaagaactggcccttcttggagggctgcgcctgcaccccggagcggatggccgaggctggcttcatccactgccccactgagaacgagccagacttggcccagtgtttcttctgcttcaaggagctggaaggctgggagccagatgacgaccccattgggccgggcacggtggcttacgcctgtaataccagcactttgggaggccgaggcgggcggatcacgagagaggaacataaaaagcattcgtccggttgcgctttcctttctgtcaagaagcagtttgaagaattaacccttggtgaatttttgaaactggacagagaaagagccaagaacaaaattgcaaaggaaaccaacaataagaagaaagaatttgaggaaactgcgragaaagtgcgccgtgccatcgagcagctggctgccatggattgaggcctctggccggagctgcctggtcccagagtggctgcaccacttccagggtttattccctggtgccaccagccttcctgtgggccccttagcaatgtcttagraaaggagatcaacattttcaaattagatgtttcaactgtgctcytgttttgtcttgaaagtggcaccagaggtgcttctgcctgtgcagcgggtgctgctggtaacagtggctgcttctctctctctctctcttttttgggggctcatttttgctgttttgattcccgggcttaccaggtgagaagtgagggaggaagaaggcagtgtcccttttgctagagctgacagctttgttcgcgtgggcagagccttccacagtgaatgtgtctggacctcatgttgttgaggctgtcacagtcctgagtgtggacttggcaggtgcctgttgaatctgagctgcaggttccttatctgtcacacctgtgcctcctcagaggacatgtttttttgtttttttttttttggtagatgcatgacttgtgtgtgatgagagaatggagacagagtcccyggctcctctactgtttaacaacatggctttcttattttgtttgaattgttaattcacagaatagcacaaactacaattaaaactaagcacaaagccattctaagtcattggggaaacggggtgaacttcaggtggatgaggagacagaatagagtgataggaagcgtctggcagatactccttttgccactgctgtgtgattagacaggcccagtgagccgcggggcacatgctggccgctcctccctcagaaaaaggcagtggcctaaatcctttttaaatgacttggctcgatgctgtgggggactggctgggctgctgcaggccgtgtgtctgtcagcccaaccttcacatctgtcacgttctccacacgggggagagacgcagtccgcccaggtccccgctttctttggaggcagcagctcccgcagggctgaagtctggcgtaagatgatggatttgattcgccctcctccctgtcatagagctgcagggtggattgttacagcttcgctggaaacctctggaggtcatctcggctgttcctgagaaataaaaagcctgtcatttcaaacactgctgtggaccctactgggtttttaaaatattgtcagtttttcatcgtcgtccctagcctgccaacagccatctgcccagacagccgcagtgaggatgagcgtcctggcagagacgcagttgtctctgggcgcttgccagagccacgaaccccagacctgtttgtatcatccgggctccttccgggcagaaacaactgaaaatgcacttcagacccacttatttctgccacatctgagtcggcctgagatagacttttccctctaaactgggagaatatcacagtggtttttgttagcagaaaatgcactccagcctctgtactcatctaagctgcttatttttgatatttgtgtcagtctgtaaatggatacttcactttaataactgttgcttagtaattggctttgtagagaagctggaaaaaaatggttttgtcttcaactcctttgcatgccaggcggtgatgtggatctcggcttctgtgagcctgtgctgtgggcagggctgagctggagcmgcccctctcagcccgcctgccacggcctttccttaaaggccatccttaaaaccagaccctcatggctrccagcacctgaaagcttcctcgacatctgttaataaagccgtaggcccttgtctaagygcaaccgcctagactttctttcagatacatgtcyacatgtccatttttcaggttctctaagttggagtggagtctgggaagggttgtgaatgaggcttctgggctatgggtgaggttccaatggcaggttagagcccctcgggccaactgccatcctggaaagtagagacagcagtgcccgctgcccagaagagaccagcaagccaaactggagcccccattgcaggctgtcgccatgtggaaagagtaactcacaattgccaataaagtctcatgtggttttatctac

SEQ ID NO: 216 - DNA, 2585 bp, Homo sapiens
gacatgccccgcggcgcgccattaaccgccagatttgaatcgcsggacccgttggcagaggtggcggcggcggcatgggtgccccgacgttgccccctgcctggcagccctttctcaaggaccaccgcatctctacattcaagaactggcccttcttggagggctgcgcctgcaccccggagcggatggccgaggctggcttcatccactgccccactgagaacgagccagacttggcccagtgtttcttctgcttcaaggagctggaaggctgggagccagatgacgaccccatagaggaacataaaaagcattcgtccggttgcgctttcctttctgtcaagaagcagtttgaagaattaacccttggtgaatttttgaaactggacagagaaagagccaagaacaaaattgcaaaggaaaccaacaataagaagaaagaatttgaggaaactgcgragaaagtgcgccgtgccatcgagcagctggctgccatggattgaggcctctggccggagctgcctggtcccagagtggctgcaccacttccagggtttattccctggtgccaccagccttcctgtgggccccttagcaatgtcttagraaaggagatcaacattttcaaattagatgtttcaactgtgctcytgttttgtcttgaaagtggcaccagaggtgcttctgcctgtgcagcgggtgctgctggtaacagtggctgcttctctctctctctctcttttttgggggctcatttttgctgttttgattcccgggcttaccaggtgagaagtgagggaggaagaaggcagtgtcccttttgctagagctgacagctttgttcgcgtgggcagagccttccacagtgaatgtgtctggacctcatgttgttgaggctgtcacagtcctgagtgtggacttggcaggtgcctgttgaatctgagctgcaggttccttatctgtcacacctgtgcctcctcagaggacagtttttttgttgttgtgtttttttgtttttttttttttggtagatgcatgacttgtgtgtgatgagagaatggagacagagtcccyggctcctctactgtttaacaacatggctttcttattttgtttgaattgttaattcacagaatagcacaaactacaattaaaactaagcacaaagccattctaagtcattggggaaacggggtgaacttcaggtggatgaggagacagaatagagtgataggaagcgtctggcagatactccttttgccactgctgtgtgattagacaggcccagtgagccgcggggcacatgctggccgctcctccctcagaaaaaggcagtggcctaaatcctttttaaatgacttggctcgatgctgtgggggactggctgggctgctgcaggccgtgtgtctgtcagcccaaccttcacatctgtcacgttctccacacgggggagagacgcagtccgcccaggtccccgctttctttggaggcagcagctcccgcagggctgaagtctggcgtaagatgatggatttgattcgccctcctccctgtcatagagctgcagggtggattgttacagcttcgctggaaacctctggaggtcatctcggctgttcctgagaaataaaaagcctgtcatttcaaacactgctgtggaccctactgggtttttaaaatattgtcagtttttcatcgtcgtccctagcctgccaacagccatctgcccagacagccgcagtgaggatgagcgtcctggcagagacgcagttgtctctgggcgcttgccagagccacgaaccccagacctgtttgtatcatccgggctccttccgggcagaaacaactgaaaatgcacttcagacccacttatttctgccacatctgagtcggcctgagatagacttttccctctaaactgggagaatatcacagtggtttttgttagcagaaaatgcactccagcctctgtactcatctaagctgcttatttttgatatttgtgtcagtctgtaaatggatacttcactttaataactgttgcttagtaattggctttgtagagaagctggaaaaaaatggttttgtcttcaactcctttgcatgccaggcggtgatgtggatctcggcttctgtgagcctgtgctgtgggcagggctgagctggagcmgcccctctcagcccgcctgccacggcctttccttaaaggccatccttaaaaccagaccctcatggctrccagcacctgaaagcttcctcgacatctgttaataaagccgtaggcccttgtctaagygcaaccgcctagactttctttcagatacatgtcyacatgtccatttttcaggttctctaagttggagtggagtctgggaagggttgtgaatgaggcttctgggctatgggtgaggttccaatggcaggttagagcccctcgggccaactgccatcctggaaagtagagacagcagtgcccgctgcccagaagagaccagcaagccaaactggagcccccattgcaggctgtcgccatgtggaaagagtaactcacaattgccaataaagtctcatgtggttttatctac

SEQ ID NO: 217 - DNA, 2649 bp, Homo sapiens
agtcccatggggaatgtcaacaggcaggggcagcactgcagagatttcatcatsgtctccyaggccctcaggctcctctgccttctgcttgggcttcagggctgcctggctgcaggcggggtcgctaaggcctcaggaggagaaacacgggacatgccgtggaagccggggcctcacagartcttcgtaacccaggaggaagcccacggcgtcctgcaccggcgccggcgcgccaacgcgytcctggaggagctgcggccgggctcccwggagaggragtgcaagsaggagcagtgcyccttcgaggaggcccgggagatcttcaaggacgcggagaggacgaagctgttctggatttcttacagtgatggggaccagtgtgcctcaagtccatgccagaatgggggcycctkmaaggaccagcyccagtcctrtatctgcttctgcctccctgccttcgagggcyrgaactgtgagacgcacaaggatgaccagctgatctgtgtgaacgagaacggcggctgtgagcrgtactrcagtgaccacacgggcaccaagygctcctgtcggtgccaygaggggtactctctgctggcagayggggtgtcctgcacacccacagttgaatatmcaygtggaraaatacctattctagaaaaaagaaatgccagcaaaccccaaggcyraattgtggggggcaaggtgtgccccaaaggggagtgtccatggcaggtcctgttgttggtgaatggagctcagttgtgtggggggamcctgatcaacaccatctgggtggtctccrcggcccactrtttcgacaaaatcaagaactggaggaaccygatcrcggtgctgggcgagcacgacctcagcgagcacgacggggatgagcagagcyggcrggtggcgcaggtcatcatccccagcacgtacgwcccgggcacyaccaaccacvacatcrygctgctcyrcctgcaccagcccrtggtcctcactgaccatgtggtgcccctctgcctgcccraacggacgttctctgagaggaygctggccttcgtgyrcttctcattgktcagsggctggrgccagctgctggaccgtggcgccacggycctggagctcrtrgtccycaacgtgmscyrgctgatgacccaggactkcctgcagcagtcacggaaggtgggagactccccaaatatcacggagtacrtgtycbgtgcyrrctactcggatggcagcaaggactcctgcaagrrgvacagtggaggcccacrkgccacccactaccrgggcacgtrgtacctgaygggcatcgtcakctgvggccagggctgcgcaaccgtgggccactttgrggtgtacaccrgggtctcccagtacatcgagtggctgcaaaagctcatgcgctcagagccacgcccaggagtcctcctgcgagccccatttccctagcccagcagccctggcctgtggagagaaagccaaggctgcgtcgaactgtcctggcaccaaatcccatatattcttctgcagttaatggggtagaggagggcatgggagggagggagaggtggggagggagacagagacagaaacagagagagacaragacagagagagactgagggagagactctgaggacatggagagagactcaaagagactccaagattcaaagagactaatagagacacagagatggaatagaaaagatgagaggcagaggcagacaggcgctggacagaggggcaggggagtgccaaggttgtcctggaggcagacagcccagctgagcctccttacctcccttcagccaagcccacctgcacgtgatctgctggcctcaggctgctgctctgccttcattgctggagacagtagaggcatgaacacacatggatgcacacacacacacgccaatgcacacacacagagatatgcacacacacggatgcacacacagatggtcacacagagatacgcaaacacaccgatgcacacgcacatagagatatgcacacacagatgcacacacagatatacacatggatgcacgcacatgccaatgcacgcacacatcagtgcacacggatgcacagagatatgcacacaccgatgtgcgcacacacagatatgcacacacatggatgagcacacacacaccaatgcgcacacacaccgatgtacacacacagatgcacacacagatgcacacacaccgatgctgactccatgtgtgctgtcctctgaaggcggttgtttagctctcacttttctggttcttatccattatcatcttcacttcagacaattcagaagcatcaccatgcatggtggcgaatgcccccaaactctcccccaaatgtatttctcccttcgctgggtgccgggctgcacagactattccccacctgcttcccagcttcacaataaacggctgcgtctcctccgcacacctgtggtgcctgccacccactgggttgcccatgattcatttttggagcccccggtgctcatcctctgagatgctcttttctttcacaattttcaacatcactgaaatgaaccctcacatggaagctattttttaaaaacaaaagctgtttgatagatgtttgaggctgtagctcccaggatcctgtggaatt

SEQ ID NO: 218 - DNA, 2946 bp, Homo sapiens
agtcccatggggaatgtcaacaggcaggggcagcactgcagagatttcatcatsgtctccyaggccctcaggctcctctgccttctgcttgggcttcagggctgcctggctgcaggcggggtcgctaaggcctcaggaggagaaacacgggacatgccgtggaagccggggcctcacagartcttcgtaacccaggaggaagcccacggcgtcctgcaccggcgccggcgcgccaacgcgytcctggaggagctgcggccgggctcccwggagaggragtgcaagsaggagcagtgcyccttcgaggaggcccgggagatcttcaaggacgcggagaggacgaagctgttctggatttcttacagtgatggggaccagtgtgcctcaagtccatgccagaatgggggcycctkmaaggaccagcyccagtcctrtatctgcttctgcctccctgccttcgagggcyrgaactgtgagacgcacaaggatgaccagctgatctgtgtgaacgagaacggcggctgtgagcrgtactrcagtgaccacacgggcaccaagygctcctgtcggtgccaygaggggtactctctgctggcagayggggtgtcctgcacacccacagttgaatatmcaygtggaraaatacctattctagaaaaaagaaatgccagcaaaccccaaggcyraattgtggggggcaaggtgtgccccaaaggggagtgtccatggcaggtcctgttgttggtgaatggagctcagttgtgtggggggamcctgatcaacaccatctgggtggtctccrcggcccactrtttcgacaaaatcaagaactggaggaaccygatcrcggtgctgggcgagcacgacctcagcgagcacgacggggatgagcagagcyggcrggtggcgcaggtcatcatccccagcacgtacgwcccgggcacyaccaaccacvacatcrygctgctcyrcctgcaccagcccrtggtcctcactgaccatgtggtgcccctctgcctgcccraacggacgttctctgagaggaygctggccttcgtgyrcttctcattgktcagsggctggrgccagctgctggaccgtggcgccacggycctggagctcrtrgtccycaacgtgmscyrgctgatgacccaggactkcctgcagcagtcacggaaggtgggagactccccaaatatcacggagtacrtgtycbgtgcyrrctactcggatggcagcaaggactcctgcaagrrgvacagtggaggcccacrkgccacccactaccrgggcacgtrgtacctgaygggcatcgtcakctgvggccagggctgcgcaaccgtgggccactttgrggtgtacaccrgggtctcccagtacatcgagtggctgcaaaagctcatgcgctcagagccacgcccaggagtcctcctgcgagccccatttccctagcccagcagccctggcctgtggagagaaagccaaggctgcgtcgaactgtcctggcaccaaatcccatatattcttctgcagttaatggggtagaggagggcatgggagggagggagaggtggggagggagacagagacagaaacagagagagacaragacagagagagactgagggagagactctgaggacatggagagagactcaaagagactccaagattcaaagagactaatagagacacagagatggaatagaaaagatgagaggcagaggcagacaggcgctggacagaggggcaggggagtgccaaggttgtcctggaggcagacagcccagctgagcctccttacctcccttcagccaagcccacctgcacgtgatctgctggcctcaggctgctgctctgccttcattgctggagacagtagaggcatgaacacacatggatgcacacacacacacgccaatgcacacacacagagatatgcacacacacggatgcacacacagatggtcacacagagatacgcaaacacaccgatgcacacgcacatagagatatgcacacacagatgcacacacagatatacacatggatgcacgcacatgccaatgcacgcacacatcagtgcacacggatgcacagagatatgcacacaccgatgtgcgcacacacagatatgcacacacatggatgagcacacacacaccaatgcgcacacacaccgatgtacacacacagatgcacacacagatgcacacacaccgatgctgactccatgtgtgctgtcctctgaaggcggttgtttagctctcacttttctggttcttatccattatcatcttcacttcagacaattcagaagcatcaccatgcatggtggcgaatgcccccaaactctcccccaaatgtatttctcccttcgctgggtgccgggctgcacagactattccccacctgcttcccagcttcacaataaacggctgcgtctcctccgcacacctgtggtgcctgccacccactgggttgcccatgattcatttttggagcccccggtgctcatcctctgagatgctcttttctttcacaattttcaacatcactgaaatgaaccctcacatggaagctattttttaaaaacaaaagctgtttgatagatgtttgaggctgtagctcccaggatcctgtggaattggatgttctctccctgccacagcccttgtcaatgatatttcacagagaccctgggagcacctgctcaagagtcagggacacacgcatcactaaatgcaagttcccaggccctggctgcagtgggaggacctggcaagctgcactcttgctgagtccccagggtggtggaagaagaatgagaaacacatgaacagagaaatggggaggtgacaaacagtgcccccactcagactccggcaagcacggctcagagagtggactcgatgccatccctgcagggccgtcctgggcaccact

SEQ ID NO: 219 - DNA, 2880 bp, Homo sapiens
agtcccatggggaatgtcaacaggcaggggcagcactgcagagatttcatcatsgtctccyaggccctcaggctcctctgccttctgcttgggcttcagggctgcctggctgcagtcttcgtaacccaggaggaagcccacggcgtcctgcaccggcgccggcgcgccaacgcgytcctggaggagctgcggccgggctcccwggagaggragtgcaagsaggagcagtgcyccttcgaggaggcccgggagatcttcaaggacgcggagaggacgaagctgttctggatttcttacagtgatggggaccagtgtgcctcaagtccatgccagaatgggggcycctkmaaggaccagcyccagtcctrtatctgcttctgcctccctgccttcgagggcyrgaactgtgagacgcacaaggatgaccagctgatctgtgtgaacgagaacggcggctgtgagcrgtactrcagtgaccacacgggcaccaagygctcctgtcggtgccaygaggggtactctctgctggcagayggggtgtcctgcacacccacagttgaatatmcaygtggaraaatacctattctagaaaaaagaaatgccagcaaaccccaaggcyraattgtggggggcaaggtgtgccccaaaggggagtgtccatggcaggtcctgttgttggtgaatggagctcagttgtgtggggggamcctgatcaacaccatctgggtggtctccrcggcccactrtttcgacaaaatcaagaactggaggaaccygatcrcggtgctgggcgagcacgacctcagcgagcacgacggggatgagcagagcyggcrggtggcgcaggtcatcatccccagcacgtacgwcccgggcacyaccaaccacvacatcrygctgctcyrcctgcaccagcccrtggtcctcactgaccatgtggtgcccctctgcctgcccraacggacgttctctgagaggaygctggccttcgtgyrcttctcattgktcagsggctggrgccagctgctggaccgtggcgccacggycctggagctcrtrgtccycaacgtgmscyrgctgatgacccaggactkcctgcagcagtcacggaaggtgggagactccccaaatatcacggagtacrtgtycbgtgcyrrctactcggatggcagcaaggactcctgcaagrrgvacagtggaggcccacrkgccacccactaccrgggcacgtrgtacctgaygggcatcgtcakctgvggccagggctgcgcaaccgtgggccactttgrggtgtacaccrgggtctcccagtacatcgagtggctgcaaaagctcatgcgctcagagccacgcccaggagtcctcctgcgagccccatttccctagcccagcagccctggcctgtggagagaaagccaaggctgcgtcgaactgtcctggcaccaaatcccatatattcttctgcagttaatggggtagaggagggcatgggagggagggagaggtggggagggagacagagacagaaacagagagagacaragacagagagagactgagggagagactctgaggacatggagagagactcaaagagactccaagattcaaagagactaatagagacacagagatggaatagaaaagatgagaggcagaggcagacaggcgctggacagaggggcaggggagtgccaaggttgtcctggaggcagacagcccagctgagcctccttacctcccttcagccaagcccacctgcacgtgatctgctggcctcaggctgctgctctgccttcattgctggagacagtagaggcatgaacacacatggatgcacacacacacacgccaatgcacacacacagagatatgcacacacacggatgcacacacagatggtcacacagagatacgcaaacacaccgatgcacacgcacatagagatatgcacacacagatgcacacacagatatacacatggatgcacgcacatgccaatgcacgcacacatcagtgcacacggatgcacagagatatgcacacaccgatgtgcgcacacacagatatgcacacacatggatgagcacacacacaccaatgcgcacacacaccgatgtacacacacagatgcacacacagatgcacacacaccgatgctgactccatgtgtgctgtcctctgaaggcggttgtttagctctcacttttctggttcttatccattatcatcttcacttcagacaattcagaagcatcaccatgcatggtggcgaatgcccccaaactctcccccaaatgtatttctcccttcgctgggtgccgggctgcacagactattccccacctgcttcccagcttcacaataaacggctgcgtctcctccgcacacctgtggtgcctgccacccactgggttgcccatgattcatttttggagcccccggtgctcatcctctgagatgctcttttctttcacaattttcaacatcactgaaatgaaccctcacatggaagctattttttaaaaacaaaagctgtttgatagatgtttgaggctgtagctcccaggatcctgtggaattggatgttctctccctgccacagcccttgtcaatgatatttcacagagaccctgggagcacctgctcaagagtcagggacacacgcatcactaaatgcaagttcccaggccctggctgcagtgggaggacctggcaagctgcactcttgctgagtccccagggtggtggaagaagaatgagaaacacatgaacagagaaatggggaggtgacaaacagtgcccccactcagactccggcaagcacggctcagagagtggactcgatgccatccctgcagggccgtcctgggcaccact

SEQ ID NO: 220 - DNA, 2583 bp, Homo sapiens
agtcccatggggaatgtcaacaggcaggggcagcactgcagagatttcatcatsgtctccyaggccctcaggctcctctgccttctgcttgggcttcagggctgcctggctgcagtcttcgtaacccaggaggaagcccacggcgtcctgcaccggcgccggcgcgccaacgcgytcctggaggagctgcggccgggctcccwggagaggragtgcaagsaggagcagtgcyccttcgaggaggcccgggagatcttcaaggacgcggagaggacgaagctgttctggatttcttacagtgatggggaccagtgtgcctcaagtccatgccagaatgggggcycctkmaaggaccagcyccagtcctrtatctgcttctgcctccctgccttcgagggcyrgaactgtgagacgcacaaggatgaccagctgatctgtgtgaacgagaacggcggctgtgagcrgtactrcagtgaccacacgggcaccaagygctcctgtcggtgccaygaggggtactctctgctggcagayggggtgtcctgcacacccacagttgaatatmcaygtggaraaatacctattctagaaaaaagaaatgccagcaaaccccaaggcyraattgtggggggcaaggtgtgccccaaaggggagtgtccatggcaggtcctgttgttggtgaatggagctcagttgtgtggggggamcctgatcaacaccatctgggtggtctccrcggcccactrtttcgacaaaatcaagaactggaggaaccygatcrcggtgctgggcgagcacgacctcagcgagcacgacggggatgagcagagcyggcrggtggcgcaggtcatcatccccagcacgtacgwcccgggcacyaccaaccacvacatcrygctgctcyrcctgcaccagcccrtggtcctcactgaccatgtggtgcccctctgcctgcccraacggacgttctctgagaggaygctggccttcgtgyrcttctcattgktcagsggctggrgccagctgctggaccgtggcgccacggycctggagctcrtrgtccycaacgtgmscyrgctgatgacccaggactkcctgcagcagtcacggaaggtgggagactccccaaatatcacggagtacrtgtycbgtgcyrrctactcggatggcagcaaggactcctgcaagrrgvacagtggaggcccacrkgccacccactaccrgggcacgtrgtacctgaygggcatcgtcakctgvggccagggctgcgcaaccgtgggccactttgrggtgtacaccrgggtctcccagtacatcgagtggctgcaaaagctcatgcgctcagagccacgcccaggagtcctcctgcgagccccatttccctagcccagcagccctggcctgtggagagaaagccaaggctgcgtcgaactgtcctggcaccaaatcccatatattcttctgcagttaatggggtagaggagggcatgggagggagggagaggtggggagggagacagagacagaaacagagagagacaragacagagagagactgagggagagactctgaggacatggagagagactcaaagagactccaagattcaaagagactaatagagacacagagatggaatagaaaagatgagaggcagaggcagacaggcgctggacagaggggcaggggagtgccaaggttgtcctggaggcagacagcccagctgagcctccttacctcccttcagccaagcccacctgcacgtgatctgctggcctcaggctgctgctctgccttcattgctggagacagtagaggcatgaacacacatggatgcacacacacacacgccaatgcacacacacagagatatgcacacacacggatgcacacacagatggtcacacagagatacgcaaacacaccgatgcacacgcacatagagatatgcacacacagatgcacacacagatatacacatggatgcacgcacatgccaatgcacgcacacatcagtgcacacggatgcacagagatatgcacacaccgatgtgcgcacacacagatatgcacacacatggatgagcacacacacaccaatgcgcacacacaccgatgtacacacacagatgcacacacagatgcacacacaccgatgctgactccatgtgtgctgtcctctgaaggcggttgtttagctctcacttttctggttcttatccattatcatcttcacttcagacaattcagaagcatcaccatgcatggtggcgaatgcccccaaactctcccccaaatgtatttctcccttcgctgggtgccgggctgcacagactattccccacctgcttcccagcttcacaataaacggctgcgtctcctccgcacacctgtggtgcctgccacccactgggttgcccatgattcatttttggagcccccggtgctcatcctctgagatgctcttttctttcacaattttcaacatcactgaaatgaaccctcacatggaagctattttttaaaaacaaaagctgtttgatagatgtttgaggctgtagctcccaggatcctgtggaatt

SEQ ID NO: 221 - DNA, 2544 bp, Homo sapiens
cgggcacgcgcgccggcgaccatggcgttcgccgggctggagcgagtacattaacccctggaggcggcggcggcggcgagggagcgagcctcgagcgggcgggccccagcctgagggaagggaggaaggggcggggagagcgccagagggaggccggtcggccgcgggcgggcgggcagcgcagcgccgagcggggcccgcgggcccatgaggaggcctggggaccatgggctccaggatcaagcagaatccagagaccacatttgaagtatatgttgaagtggcctatcccaggacaggtggcactctttcagrtcctgaggtgcagaggcaattcccggaggactacagtgaccaggaagttctacagactttgaccaagttttgtttccccttctatgtggacagcctcacagttagccaagttggccagaacttcacattcgtgctcactgacattgacagcaaacagagattcgggttctgccgcttatcttcaggagcgaagagctgcttctgtatcttaagctatctcccctggttcgaggtattttataagctgcttaacatcctggcagattacacgacaaaaagacaggaaaatcagtggaatgagcttcttgaaactctgcacaaacttcccatccctgacccaggagtgtctgtccatctcagcgtgcattcttattttactgtgcctgataccagagaacttcccagcatacctgagaatagaaatctgacagaatattttgtggctgtggatgttaacaacatgttgcatctgtacgccagtatgctgtacgaacgccggatactcatcatttgcagcaaactcagcactctgactgcctgcatccacgggtctgcggcgatgctctaccccatgtactggcagcacgtgtacatccccgtgctgccgccgcatctgctggactactgctgtgctcccatgccctacctcataggaatccatttaagtttaatggagaaagtcagaaacatggccctggatgatgtcgtgatcctgaatgtggacaccaacaccctggaaacccccttcgatgacctccagagcctcccaaacgacgtgatctcttccctgaagaacaggctgaaaaaggtctccacaaccactggggatggtgtggccaragcgttcctcaaggcccaggctgctttcttcggtagctaccgaaacgctcygaaaatcgagccggaggagccgatcactttctgtgaggaagccttcgtgtcccactaccgctccggagccatgaggcagttcctgcagaacgccacacagctgcagctcttcaagcagtttattgatggtcgattagatcttctcaattccggcgaaggtttcagtgatgtttttgaagaggaaatcaacatgggcgagtacgctggattcctgttgagattaaatcagagtacatgaggaaaggtttgtgcagtcatccaggacagttcctggcatggggactgtgtgcagcagtgacaaactgtaccatcagtggctctccactgtccggaaaggaagtggagcaattctgaatactgtaaagaccaaagcaaatccggccatgaagactgtctacaagttcgcaaaagatcatgcaaaaatgggaataaaagaggtgaaaaaccgcttgaagcaaaaggacattgccgagaatggctgcgcccccaccccagaagagcagctgccaaagactgcaccgtccccactggtggaggccaaggaccccaagctccgagaagaccggcggccaatcacagtccactttggacaggtgcgcccacctcgtccacatgttgttaagagaccaaagagcaacatcgcagtggaaggccggaggacgtctgtgccgagccctgagcaaaacaccattgcaacaccagctacactccacatcctacagaaaagcattacccattttgcggccaagttcccgacgagaggctggacctcttcatcacattgacttacgccgttgcttttccagactgggcagaggggctgacttcgcagtgtgtgccaaagagccggtgtctgataatcccattttcctgcttatcacctgaactgtgtcagtatcacttttagttttgttggttggttggtttgttgtttgtttaatatgccctgttttctacttctgttggaaaatatttggggttgaaataaaccagtgggagcatgggagccagtttggtggttggcaaactaccagtgatagaaaacaaatgacaggttttctgtgagcgtacgtcacagtggctcgggcccacaaggagacagaggggtacgtttcaggacatcattccaagggtttctgttcacgtttgtttaacgaggaaggggaagttgttctcccataataccagtggtatttctagtgcaacccgggtgtttttctacgcctcttcccatgctgcttccccacccccccactgtgctccgccccttccaaatgccatgtcacaacagcacttggatgtgtttttctcaactgtcatcagctccagctggcagga

SEQ ID NO: 222 - DNA, 2487 bp, Homo sapiens
gcggcgcgcgccgggcacgcgcgccggcgaccatggcgttcgccgggctggagcgagtacattaacccctggaggcggcggcggcggcgagggagcgagcctcgagcgggcgggccccagcctgagggaagggaggaaggggcgrggagagcgccagagggaggccggtcggccgcgggcgggcgggcagcgcagcgccgagcggggcccgcgggcccatgaggaggcctggggaccatgggctccaggatcaagcagaatccagagaccacatttgaagtatatgttgaagtggcctatcccaggacaggtggcactctttcagctgtcaattatttacagatcctgaggtgcagaggcaattcccggaggactacagtgaccaggaagttctacagactttgaccaagttttgtttccccttctatgtggacagcctcacagttagccaagttggccagaacttcacattcgtgctcactgacattgacagcaaacagagattcgggttctgccgcttatcttcaggagcgaagagctgcttctgtatcttaagctatctcccctggttcgaggtattttataagctgcttaacatcctggcagattacacgacaaaaagacaggaaaatcagtggaatgagcttcttgaaactctgcacaaacttcccatccctgacccaggagtgtctgtccatctcagcgtgcattcttattttactgtgcctgataccagagaacttcccagcatacctgagaatagaaatctgacagaatattttgtggctgtggatgttaacaacatgttgcatctgtacgccagtatgctgtacgaacgccggatactcatcatttgcagcaaactcagcactctgactgcctgcatccacgggtctgcggcgatgctctaccccatgtactggcagcacgtgtacatccccgtgctgccgccgcatctgctggactactgctgtgctcccatgcrctacctcataggaatccatttaagtttaatggagaaagtcagaaacatggycctggatgatgtcgtgatcctgaatgtggacaccaacaccctggaaacccccttcgatgacctccagagcctcccaaacgacgtgatctcttccctgaagaacaggctgaaaaaggtctccacaaccactggggatggtgtggccagagcgttcctcaaggcccaggctgctttcttcggtagctaccgaaacgctctgaaaatcgagccggaggagccgatcactttctgtgaggaagccttcgtgtcccactaccgctccggagccatgaggcagttcctgcagaacgccacacagctgcagctcttcaagcagtttattgatggtcgattagatcttctcaattccggcgaaggtttcagtgatgtttttgaagaggaaatcaacatgggcgagtacgctggcagtgacaaactgtaccatcagtggctctccactgtccggaaaggaagtggagcaattctgaatactgtaaagaccaaagcaaatccggccatgaagactgtctacaagttcgcaaaagatcatgcaaaaatgggaataaaagaggtgaaaaaccgcttgaagcaaaaggacattgccgagaatggctgcgcccccaccccagaagagcagctgccaaagactgcaccgtccccactggtggaggccaaggaccccaagctccgagaagaccggcggccaatcacagtccactttggacaggtgcgcccacctcgtccacatgttgttaagagaccaaagagcaacatcgcagtggaaggccggaggacgtctgtgccgagccctgagcaaaacaccattgcaacaccagctacactccacatcctacagaaaagcattacccattttgcggccaagttcccgacgagaggctggacctcttcatcacattgacttacgccgttgcttttccagactgggcagaggggctgacttcgcagtgtgtgccaaagagccggtgtctgataatcccattttcctgcttatcacctgaactgtgtcagtatcacttttagttttgttggttggttggtttgttgtttgtttaatatgccctgttttctacttctgttggaaaatatttggggttgaaataaaccagtgggagcatgggagccagtttggtggttggcaaactaccagtgatagaaaacaaatgacaggttttctgtgagcgtacgtcacagtggctcgggcccacaaggagacagaggggtacgtttcaggacatcattccaagggtttctgttcacgtttgtttaacgaggaaggggaagttgttctcccataataccagtggtatttctagtgcaacccgggtgtttttctacgcctcttcccatgctgcttccccacccccccactgtgctccgccccttccaaatgccatgtcacaacagcacttggatgtgtttttctcaactgtcatcagctccagctggcagga

SEQ ID NO: 223 - DNA, 4977 bp, Homo sapiens
cgggcacgcgcgccggcgaccatggcgttcgccgggctggagcgagtacattaacccctggaggcggcggcggcggcgagggagcgagcctcgagcgggcgggccccagcctgagggaagggaggaaggggcggggagagcgccagagggaggccggtcggccgcgggcgggcgggcagcgcagcgccgagcggggcccgcgggcccatgaggaggcctggggaccatgggctccaggatcaagcagaatccagagaccacatttgaagtatatgttgaagtggcctatcccaggacaggtggcactctttcagrtcctgaggtgcagaggcaattcccggaggactacagtgaccaggaagttctacagactttgaccaagttttgtttccccttctatgtggacagcctcacagttagccaagttggccagaacttcacattcgtgctcactgacattgacagcaaacagagattcgggttctgccgcttatcttcaggagcgaagagctgcttctgtatcttaagctatctcccctggttcgaggtattttataagctgcttaacatcctggcagattacacgacaaaaagacaggaaaatcagtggaatgagcttcttgaaactctgcacaaacttcccatccctgacccaggagtgtctgtccatctcagcgtgcattcttattttactgtgcctgataccagagaacttcccagcatacctgagaatagaaatctgacagaatattttgtggctgtggatgttaacaacatgttgcatctgtacgccagtatgctgtacgaacgccggatactcatcatttgcagcaaactcagcactctgactgcctgcatccacgggtctgcggcgatgctctaccccatgtactggcagcacgtgtacatccccgtgctgccgccgcatctgctggactactgctgtgctcccatgccctacctcataggaatccatttaagtttaatggagaaagtcagaaacatggccctggatgatgtcgtgatcctgaatgtggacaccaacaccctggaaacccccttcgatgacctccagagcctcccaaacgacgtgatctcttccctgaagaacaggctgaaaaaggtctccacaaccactggggatggtgtggccaragcgttcctcaaggcccaggctgctttcttcggtagctaccgaaacgctcygaaaatcgagccggaggagccgatcactttctgtgaggaagccttcgtgtcccactaccgctccggagccatgaggcagttcctgcagaacgccacacagctgcagctcttcaagcagtttattgatggtcgattagatcttctcaattccggcgaaggtttcagtgatgtttttgaagaggaaatcaacatgggcgagtacgctggcagtgacaaactgtaccatcagtggctctccactgtccggaaaggaagtggagcaattctgaatactgtaaagaccaaagcaaatccggccatgaagactgtctacaagttcgcaaaagatcatgcaaaaatgggaataaaagaggtgaaaaaccgcttgaagcaaaaggacattgccgagaatggctgcgcccccaccccagaagagcagctgccaaagactgcaccgtccccactggtggaggccaaggaccccaagctccgagaagaccggcggccaatcacagtccactttggacaggtgcgcccacctcgtcracatgttgttaagagaccaaagagcaacatcgcagtggaaggccggaggacgtctgtgccgagccctgagcagccgcagccgtatcggacactcagggagtcagacagcgcggaaggcgacgaggcagagagtccagagcagcaagtgcggaagtccacaggccctgtcccagctccccctgaccgggctgccagcatcgaccttctggaagacgtcttcagcaacctggacatggaggccgcactgcagccactgggccaggccaagagcttagaggaccttcgtgcccccaaagacctgagggagcagccagggacctttgactatcagaggctggatctgggcgggartgagaggagccrcggggtgacagtggccttgaagcttacccacccgtacaacaagctctggagcctgggccaggacgacatggccatccccagcaagcccccagctgcctcccctgagaagccctcggccctgctcgggaactccctggccctgcctcgaaggccccagaaccgggacagcatcctgaaccccagtgacaaggaggaggtgcccacccctactctgggcagcatcaccatcccccggccccaaggcaggaagaccccagagctgggcatcgtgcctccaccgcccattccccgcccggccaagctccaggctgccggcgccgcacttggtgacgtctcagagcggctgcagacggatcgggacaggcgagctgccctgagtccagggctcctgcctggtgttgtcccccaaggccccactgaactgctccagccgctcagccctggccccggggctgcaggcacgagcagtgacgccctgctcgccctcctggacccgctcagcacagcctggtcaggcagcaccctcccgtcacgccccgccaccccgaatgtagccaccccattcaccccccaattcagcttcccccctgcagggacacccaccccattcccacagccaccactcaacccctttgtcccatccatgccagcagccccacccaccctgcccctggtctccacaccagccgggcctttcggggcccctccagcttccctggggccggcttttgcgtccggcctcctgctgtccagtgctggcttctgtgcccctcacaggtctcagcccaacctctccgccctctccatgcccaacctctttggccagatgcccatgggcacccacacgagccccctacagccgctgggtcccccagcagttgccccgtcgaggatccgaacgttgcccctggcccgctcaagtgccagggctgctgagaccaagcaggggctggccctgaggcctggagaccccccgcttctgcctcccaggccccctcaaggcctggagccaacactgcagccctctgctcctcaacaggccagagacccctttgaggatttgttacagaaaaccaagcaagaygtgagcccgagtccggccctggccccggccccagactcggtggagcagctcaggaagcagtgggagaccttcgagtgagccgggccctgagggtgggggatgcaccgaggcccgagggtccgtccactgctgcggttccgaggctcccccgccactctctctctgcccaggttctgctggtgggaagggatgggacccctctctgctgccccctcctcccctccacactgcccatctctgatgtctggccctggggaatggcaccagttccagcctgggaatcaacccagttcctgagtgcccatcccaccccgcggttgcctctcctcggcacccttgattgggttttgcactaaagaggtcagctgggccaatgatattgctccagaccgagtcctacccaccttcccccggaagtgtcccaagaggctccgaaggcctcccctccgagcccagctctcctgtctcctccacagccaggccctgcacgcccacctcctcggacacaggtgacagggttaccctccagtttgagctcatctgcacgagacacaggtagcttggggttgaagttaggactcctcctgggctggaggatttacctggtggggcacttccagactgtttctagcaatatacacacacgttctttcctgtgtcttcaccccaaaacttcagttgattctgacctgggaggatctggggaccagggggtcttgggctgccttgtgatacacagccccagccaccctgcacgggggctgcgagcaccagcaactttgatttatagaaggaaaatggaaacccccatctgagtattttgggaggagcccccagccctcatccagctctggcacgctgatacctccaggtactcccctcactgtcaaagctggggctcagcctcttgtcatctggagctttgtgggcaaagctgagaagctgcaacccagatttcaacccaaaaagttggaacgaggcagtggccctgagccccttctccagggccaggtagaaaggacaaacttggtctctgcctcggggaagcaggaggagggctagaagccagtccctccccacctgcccagagctccaggccagcacagaaattcctgaggccaacgtcaccaaagttagattgaatgtttattatctttctttttcctttttaccttattgatttgatgaatcttgaaatggattcatttccataaaccaagttaaagtatggcccgaccatttaagaaaacaaccatctgagacacgcaggaaattgtgagcatttcgacccgagctctcatttcctatttgtgaagggtcagacacagtctacccaggggtgtctgggggacaagggggtctctggagatgtcacccakggagccccctctatgtctgagaggctgccactgctgcacatgctcagtgaggcttggcggccatcctggcacatggctcttcctgggtcaaccgtgacctgtctggctcaggaatgggctctggctgctgggggagccgtgtcactcctgggccatgggggcacctcctgggcacttaggtgtttcagcatagattccagtttcgcaccctgggcagacccccaggccccatccgggatagggcagaggaggtgctggcggccccagggaaggagggtgtgtaccccaaggccccctggctgtgctgaggggctggggtgagcgctccatgttcacatgagcactgctgcctcttcacttgtgggactttttgcaaacccaaggatgaactttgtgtgcattcaataaaatcatcttggg

SEQ ID NO: 224 - DNA, 2411 bp, Homo sapiens
cacgcgcgccggcgaccatggcgttcgccgggctggagcgagtacattaacccctggaggcggcggcggcggcgagggagcgagcctcgagcgggcgggccccagcctgagggaagggaggaaggggcggggagagcgccagagggaggccggtcggccgcgggcgggcgggcagcgcagcgccgagcggggcccgcgggcccatgaggaggcctggggaccatgggctccaggatcaagcagaatccagagaccacatttgaagtatatgttgaagtggcctatcccaggacaggtggcactctttcaggaagttctacagactttgaccaagttttgtttccccttctatgtggacagcctcacagttagccaagttggccagaacttcacattcgtgctcactgacattgacagcaaacagagattcgggttctrccgcttatcttcaggagcgaagagctgcttctgtatcttaagctatctcccctggttcgaggtattttataagctgcttaacatcctggcagattacacgacaaaaagacaggaaaatcagtggaatgagcttcttgaaactctgcacaaacttcccatccctgacccaggagtgtctgtccatctcagcgtgcattcttattttactgtgcctgataccagagaacttcccagcatacctgagaatagaaatctgacagaatattttgtggctgtggatgttaacaacatgttgcatctgtacgccagtatgctgtacgaacgccggatactcatcatttgcagcaaactcagcactctgactgcctgcatccacgggtctgcggcgatgctctaccccatgtactggcagcacgtgtacatccccgtgctgccgccgcatctgctggactactgctgtgctcccatgccctacctcataggaatccatttaagtttaatggagaaagtcagaaacatggccctggatgatgtcgtgatcctgaatgtggacaccaacaccctggaaacccccttcgatgacctccagagcctcccaaacgacgtgatctcttccctgaagaacaggctgaaaaaggtctccacaaccactggggatggtgtggccagagcgttcctcaaggcccaggctgctttcttcggtagctaccgaaacgctctgaaaatcgagccggaggagccgatcactttctgtgaggaagccttcgtgtcccactaccgctccggagccatgaggcagttcctgcagaacgccacacagctgcagctcttcaagcagtrtattgatggtcgattagatcttctcaattccggcgaaggtttcagtgatgyttttgaagaggaaatcaacatgggcgagtacgctggcagtgacaaactgtaccatcagtggctctccactgtccggaaaggaagtggagcaattctgaatactgtaaagaccaaagcaaatccggccatgaagactgtctacaagttcgcaaaagatcatgcaaaaatgggaataaaagaggtgaaaaaccgcttgaagcaaaaggacattgccgagaatggctgcgcccccaccccagaagagcagctgccaaagactgcaccgtccccactggtggaggccaaggaccccaagctccgagaagaccggcggccaatcacagtccactttggacaggtgcgcccacctcgtccacatgttgttaagagaccaaagagcaacatcgcagtggaaggccggaggacgtctgtgccgagccctgagcaaaacaccattgcaacaccagctacactccacatcctacagaaaagcattacccattttgcggccaagttcccgacgagaggctggacctcttcatcacattgacttacgccgttgcttttccagactgggcagaggggctgacttcgcagtgtgtgccaaagagccggtgtctgataatcccattttcctgcttatcacctgaactgtgtcagtatcacttttagttttgttggttggttggtttgttgtttgtttaatatgccctgttttctacttctgttggaaaatatttggggttgaaataaaccagtgggagcatgggagccagtttggtggttggcaaactaccagtgatagaaaacaaatgacaggttttctgtgagcgtacgtcacagtggctcgggcccacaaggagacagaggggtacgtttcaggacatcattccaagggtttctgttcacgtttgtttaacgaggaaggggaagttgttctcccataataccagtggtatttctagtgcaacccgggtgtttttctacgcctcttcccatgctgcttccccacccccccactgtgctccgccccttccaaatgccatgtcacaacagcacttggatgtgtttttctcaactgtcatcagctccagctggcagga

SEQ ID NO: 225 - DNA, 4064 bp, Homo sapiens
gtagttgagggtggctgtgcaagtcagactcctttccaccaggaaacacagaaaacattctatcttcccaaatgttactctctcagatttgcaccaagaccctagaagtttcttaaatttccatatactttatggacactacaaagcaattccaggaaacactgatacagtagcaaaactactgggagtggaaattggatggagatctgggtcccagttcagagtctgacacctgatttgcaacataattaggcacagggcactcaactattcagggccctaaacccttctattgaaagggaaatgggagaacaatatgtgttcctatggctcagtccctataagattctgtactattcagagttgattttaagtgtcacttaactgaaattatccaacaaaccttcatggcatgaaacattaacacagctctttttatatggcatggttcctatggctcaatccctataagattctgtactattcagagttgattttaaaagtcacttaactgaaattatccaacaaaccctcgaggacattaaacattaacgtggctctttttatatggcatggttcattatcatgccaataaatgattaatcgtaactctctgtcttgaccaataattttgctggacttttgtgattcacaacgtgytctgtgttgtaatgctacctcttgaaactgacatcctagctttattgttttttattacttccctaaggtggctttcaaaagagacaccaagtgacatatttttaggaggggtttaaaagtttgatggggtagaagtaaacgttgcttaactcaaccagcagcagagccagggcccagggaccagcgcttctgtggacttggcctttcsagcagcagacccagcaatgaatgatccgaacagctgtgtggacaatgcaacagtttgctctggtgcatcctgtgtggtacctgagagcaatttcaataacatcctaagtgtggtcctaagtacggtgctgaccatcctgttggcyttggtgatgttctccatgggatgcaacgtggaaatcaagaaatttctagggcacataaagcggccgtggggcatttgtgttggcttcctctgtcagtttggaatcatgcccctcacaggattcatcctgtcggtggcctttgacatcctcccgctccaggccrtagtggtgctcattataggatgctgccctggaggaactgcctccaatatcttggcctattgggtcgatggcgacatggacctgagcgtcagcatgaccacatgctccacactgcttgccctcggaatgatgccrctgtgcctccttatctataccaaaatgtgggtcgactctgggagcatcrtaattccctatgataacataggtacatctytggttkctctcgttgttcctgtttccattggaatgtttgttaatcacaaatggccccaaaaagcaaagatcatacttaaaattgggtccatcgcgggcgccatcctcattgtgctcatagctgtggttggaggaatattgtaccaaagcgcctggatcattgctcccaaactgtggattataggaacaatatttcctgtggcgggttactccctggggtttcttctggctagaattgctggtctaccctggtacaggtgccgaacggttgcttttgaaacggggatgcagaacacgcagctatgttccaccatcgttcagctctccttcactcctgaggagctcaatgtcgtattcaccttcycgctcatctacagcattttccagctcgcctttgccgcaatattcttaggattttatgtggcatacaagaaatgtcatggaaaaaacaaggcagaaattccagagagcaaagaaaatggaacggagccagagtcatcgttttataaggcaaatggaggatttcaacctgacgaaaagtagacatcaagtggacaaaacagacgagttccaaattacgttcttaaaccgtaactatatttaattatttgttttggtaggacagttggcagaaaagagttaaagtgaaaattggaatttcaytggaattcatgtattggtttcagtaccaagtgactggtggcccaattctttaatgggacaaatattgtttcctatatatatgtrtatgttttatatatgtatgtatactcatatagatatattgtcattgaaatattcccccaaaatattctcagactaaacctgacatagggaacaccgagaatgaaaacatckttaacaccaaaactgaattcttatgcagaatttcctagcccatagatgacaacctgastttctgtatgttaaagtagatgtaatgaattattattattacagtggtcacgattttcttcagtgtttatgattataaaaattgacatgaacatctttcactgacattttaatcattattttaaaagctttgcaacctatatatttatataactttgtaatataacatgggcaaatatctgacttctgtatttttaaaaagttgccttctccagtggcagtccaaaagcagaaatgagaggaaattattacaaaatagaattcaataaccatattggatgcaggctcttaactcagcagggatatcgtacatctattgctctacctcaggggtccagtgatacccactagatcttccaaggaaaaacataattctttcaaayggtgtgtatttggcaaagagctcttcaaatctgggagagggacttcctcaaggttttcctgtgtgcagtggatccacatagctaatatgacagctagtcagttgacagggaccacccacagtaagcaccatggtcagggaggtggcaggaggtgcaaagacagaagtattgagagaaacaccaagactctagtggaggaattaattcaatgggagatagtataaaatacatagaaaacacaagtaacagaaacctggttgaaatgctwractagagtcaattagatgtgcaggagtaagtagtataagaagaatcaagtccgagagtgatcaggaaatgagtattaaacagtatttgaaacagagaacgtgtcccagggcccaaaagtcagaagggccccaccagccaggaaagttgtttcaatgctgtaagtaggtgtagccaagggaagccaggactatctgatatacggtagcaggggtttacggctgccaggggaaaataactcatcaagtgttggactttcaattataagatcgaatttaatttcctttccctcattctgcagcaatcagaatacacaatcttaaccactcggtccttagtggttttgttccattttgcattgggtattttcactgcctcatagagtctatttcaagtgttttggctgaaagggctttttgcatttgcatgttctgagttcagattctgctggtgcacccaagcattatgggaacrggaactcaacttagctcttccagtagaggggtgagggattctgcttttcaaattcataacattgatctttttatgcaagatttccatttacagttgaataagtacttcatatttttccatcattagacaaatacaaaatggactaaataattttaagagatagtggaggagagggggtacagacttccttcttagagagtgtcagagaatatgctcccaatggtggaaaggaagatttacagtctagcggctaagtacctcctacacatttcccatcaatcagaaaatagacaggtacactaaagggaccctgagaactcctcttgtaatttcaacacacccaaaatcaagggcctggatgccagcagctgcagcaagcaggtttttcctccctgttgagcaagacaggtgagcaagataggacttggctttcttacatgatgcggtaacttgtgacttgagtctttttccctaatttgctagtgggaagaaaaatagctgagctttctaaaatgatagctctctatttttaaatgaatttgaaaagtcgattaaattatgtattttattgcctctgagtatcatattaaatgaatattttattttaaaggcttaaataaatgaaaatgatttttgt

SEQ ID NO: 226 - DNA, 918 bp, Homo sapiens
atgcgcgaggggctgggcgcggcgtgcgaggccgccgggccccggctgtgcaggctgctctgcaggatcctccggccgaagcctgactgctgcccgcgcagagccagtccagtgacacaggatgaccttcagtatcacaacctcagcaagcagcagaatgagtccccgcagcccctcgtggagacgggaaagaagtctccrgaatctctggtcaagctggatgcaaccccattgtcctccccacggcatgtgaggatcaaaaactggggcagcgggatgactttccaagacacacttcaccataaggccaaagggattttaacttgcaggtccaaatcttgcctggggtccattatgactcccaaaagtttgaccagaggacccagggacaagcctacccctccagatgagcttctacctcaagctatcgaatttgtcaaccaatattacggctccttcaaagaagctcatagacatcatagcatttctaatgccttagaaaatgactatatgaaaatggctatcacatctaaaactctgaaggaattggatgtgaatgtaaaaaataatcctttcttgcatatgcacgtgctgaccaccatgtgtgttggtggtgtgggtgttatggtgatcattactgttgtcatgctcagggcaaaaatagaggaacatctggccagggtggaagcggtaacaaaggagatagaaacaacaggaacctaccaactgacgggagatgagctcatcttcgccaccaagcaggcctggcgcaatgccccacgctgcattgggaggatccagtggtccaacctgcaggtgaacttccttagacttgagcgggagagagctggaggcggccaggccctgagcagatggcttggaacagccacacagagctgtgcccaggcctcctgggac

SEQ ID NO: 227 - DNA, 4064 bp, Homo sapiens
ctctcggccacctttgatgaggggactgggcagttctagacagtcccgaagttctcaaggcacaggtctcttcctggtttgactgtccttaccccggggaggcagtgcagccagctgcaagccccacagtgaagaacatctgagctcaaatccagataagtgacataagtgacctgctttgtaaagccatagagatggcctgtccttggaaatttctgttcaagaccaaattccaccagtatgcaatgaatggggaaaaagacatcaacaacaatgtggagaaagcyccctgtgccacctccagtccagtgacacaggatgaccttcagtatcacaacctcagcaagcagcagaatgagtccccgcagcccctcgtggagacgggaaagaagtctccrgaatctctggtcaagctggatgcaaccccattgtcctccccacggcatgtgaggatcaaaaactggggcagcgggatgactttccaagacacacttcaccataaggccaaagggattttaacttgcaggtccaaatcttgcctggggtccattatgactcccaaaagtttgaccagaggacccagggacaagcctacccctccagatgagcttctacctcaagctatcgaatttgtcaaccaatattacggctccttcaaagaggcaaaaatagaggaacatctggccagggtggaagcggtaacaaaggagatagaaacaacaggaacctaccaactgacgggagatgagctcatcttcgccaccaagcaggcctggcgcaatgccccacgctgcattgggaggatccagtggtccaacctgcaggtcttcgatgcccgcagctgttccactgccygggaaatgtttgaacacatctgcagacacgtgcgttactccaccaacaatggcaacatcaggtcggccatcaccgtgttcccccagcggagtgatggcaagcacgacttccgggtggcccgtcttgttccccagctgtgcatcgacctgggctggaagcccaagtacggccgcttcgatgtggtccccctggtcctgcaggccaatggccgtgaccctgagctcttygaaatcccacctgaccttgtgcttgaggtggccatggaacatcccaaatacgagtggtttcgggaactggagctaaagtggtacgccctgcctgcagtggccaacatgctgcttgaggtgggcggcctggagttcccagggtgccccttcaatggctggtacatgggcacagagatcggagtccgggacttctgtgaygtccagcgctacaacatcctggaggaagtgggcaggagaatgggcctggaaacgcacaagctggcctcgctctggaaagaccaggctgtcgttgagatcaacattgctgtgctccatagtttccagaagcagaatgtgaccatcatggaccaccactcggctgcagaatccttcatgaagtacatgcagaatgaataccggtcccgtgggggctgcccggcagactggatttggctggtccctcccatgtctgggagcatcacccccgtgtttcaccaggagatgctgaactacgtcctgtcccctttctactactatcaggtagaggcctggaaaacccatgtctggcaggacgagaagcrgagacccaagagaagagagattccattgaaagtcttggtcaaagctgtgctctttgcctgtatgctgatgcgcaagacaatggcgtcccgagtcagagtcaccatcctctttgcgacagagacaggaaaatcagaggcgctggcctgggacctgggggccttattcagctgtgccttcaaccccaaggttgtctgcatggataagtacaggctgagctgcctggaggaggaacggctgctgttggtggtgaccagtacgtttggcaatggagactgccctggcaatggagagaaactgaagaaatygctcttcatgctgaaagagctcaacaacaaattcaggtacgctgtgtttggcctcggctccagcatgtaccctcggttctgcgcctttgctcatgacattgatcagaagctgtcccacctgggggcctctcagctcaccccgatgggagaaggggatgagctcagtgggcaggaggacgccttccgcagctgggccgtgcaaaccttcaaggcagcctgtgagacgtttsatgtccgaggcaaacagcacattcagatccccaagctctacacctccaatgtgacctgggacccgcaccactacaggctcgtgcaggactcacagcctttggacctcagcaaagccctcagcagcatgcatgccaagaacgtgttcaccatgaggctcaaatctcggcagaatctacaaagtccgacatccagccgtgccaccatcctggtggaactctcctgtgaggatggccaaggcctgaactacctgccgggggagcaccttggggtttgcccaggcaaccagccggccctggtccaaggyatcctggagcgagtggtggatggccccacaccccaccagacagtgcgcctggaggccctggatgagagtggcagctactgggtcagtgacaagaggctgcccccctgctcactcagccaggccctcacctacttcctggacatcaccacacccccacccagctgctgctccaaaagctggcccaggtggccacagaaragcctgagagacgaggctggaggccctgtgccagccctcagagtacagcaagtggaagttcaccaacagccccacattcctggagytgctagaggagttcccgtccctgcgggtgtctgctggcttcctgctttcccagctccccattctgaagcccaggttctactccatcagctcctcccgggatcacacgcccacrgagatccacctgactgtggccgtggtcacctaccacacccgagatggccagggtcccctgcaccacggcgtctgcagcacatggctcaacagcctgaagccccaagacccagtgccctgctttgtgcggaaygccagcggcttccacctccccgaggatccctcccatcctygcatcctcatcgggcctggcacaggcatcgcgcccttccgcagtttctggcagcaacggctccatgactcccagcacaagggagtgcggggaggccgcatgaccttggtgtttgggtgccgccgcccagatgaggaccacatctaccaggaggagatgctggagatggcccagaagggggtgctgcatgcggtgcacacagcctattcccgcctgcctggcaagcccaaggtctatgttcaggacatcctgcggcagcagctggccagcgaggtgctccgtgtgctccacaaggagccaggccacctctatgtttgcggggatgtgcgcatggcccgggacgtggcccacaccctgaagcagctggtggctgccaagctgaaattgaatgaggagcaggtcgaggactatttctttcagctcaagagccagaagcgctatcacgaagatatctttggtgctgtatttccttacgaggcgaagaaggacagggtggcggtgcagcccagcagcctggagatgtcagcgctctgagggcctacaggaggggttaaagctgccggcacagaacttaaggatggagccagctctgcattatcygaggtcacagggcctggggagatggaggaaagtgatatcccccagcctcaaktcttatttcctcaacgttgctccccatcaagccctttacttgacctcctaacaagtagcaccctggattgatcggagcctcctctctcaaactggggcctccctggtcccttggagacraaatcttaaatgccaggcctggcaagtgggtgaaagatggaacttgctgctgagtgcaccacttcaagtgaccaccaggaggtgctatcgcaccactgtgtatttaactgccttgtgtacagttatttatgcctctgtatttaaaaaactaacacccagtctgttccccatggccacttgggtcttccctgtatgattccttgatggagatatttacatgaattgcattttactttaatcac

SEQ ID NO: 228 - DNA, 4133 bp, Homo sapiens
ctctcggccacctttgatgaggggactgggcagttctagacagtcccgaagttctcaaggcacaggtctcttcctggtttgactgtccttaccccggggaggcagtgcagccagctgcaagccccacagtgaagaacatctgagctcaaatccagataagtgacataagtgacctgctttgtaaagccatagagatggcctgtccttggaaatttctgttcaagaccaaattccaccagtatgcaatgaatggggaaaaagacatcaacaacaatgtggagaaagcyccctgtgccacctccagtccagtgacacaggatgaccttcagtatcacaacctcagcaagcagcagaatgagtccccgcagcccctcgtggagacgggaaagaagtctccrgaatctctggtcaagctggatgcaaccccattgtcctccccacggcatgtgaggatcaaaaactggggcagcgggatgactttccaagacacacttcaccataaggccaaagggattttaacttgcaggtccaaatcttgcctggggtccattatgactcccaaaagtttgaccagaggacccagggacaagcctacccctccagatgagcttctacctcaagctatcgaatttgtcaaccaatattacggctccttcaaagaggcaaaaatagaggaacatctggccagggtggaagcggtaacaaaggagatagaaacaacaggaacctaccaactgacgggagatgagctcatcttcgccaccaagcaggcctggcgcaatgccccacgctgcattgggaggatccagtggtccaacctgcaggtcttcgatgcccgcagctgttccactgccygggaaatgtttgaacacatctgcagacacgtgcgttactccaccaacaatggcaacatcaggtcggccatcaccgtgttcccccagcggagtgatggcaagcacgacttccgggtgtggaatgctcagctcatccgctatgctggctaccagatgccagatggcagcatcagaggggaccctgccaacgtggaattcactcagctgtgcatcgacctgggctggaagcccaagtacggccgcttcgatgtggtccccctggtcctgcaggccaatggccgtgaccctgagctcttygaaatcccacctgaccttgtgcttgaggtggccatggaacatcccaaatacgagtggtttcgggaactggagctaaagtggtacgccctgcctgcagtggccaacatgctgcttgaggtgggcggcctggagttcccagggtgccccttcaatggctggtacatgggcacagagatcggagtccgggacttctgtgaygtccagcgctacaacatcctggaggaagtgggcaggagaatgggcctggaaacgcacaagctggcctcgctctggaaagaccaggctgtcgttgagatcaacattgctgtgctccatagtttccagaagcagaatgtgaccatcatggaccaccactcggctgcagaatccttcatgaagtacatgcagaatgaataccggtcccgtgggggctgcccggcagactggatttggctggtccctcccatgtctgggagcatcacccccgtgtttcaccaggagatgctgaactacgtcctgtcccctttctactactatcaggtagaggcctggaaaacccatgtctggcaggacgagaagcrgagacccaagagaagagagattccattgaaagtcttggtcaaagctgtgctctttgcctgtatgctgatgcgcaagacaatggcgtcccgagtcagagtcaccatcctctttgcgacagagacaggaaaatcagaggcgctggcctgggacctgggggccttattcagctgtgccttcaaccccaaggttgtctgcatggataagtacaggctgagctgcctggaggaggaacggctgctgttggtggtgaccagtacgtttggcaatggagactgccctggcaatggagagaaactgaagaaatygctcttcatgctgaaagagctcaacaacaaattcaggtacgctgtgtttggcctcggctccagcatgtaccctcggttctgcgcctttgctcatgacattgatcagaagctgtcccacctgggggcctctcagctcaccccgatgggagaaggggatgagctcagtgggcaggaggacgccttccgcagctgggccgtgcaaaccttcaaggcagcctgtgagacgtttsatgtccgaggcaaacagcacattcagatccccaagctctacacctccaatgtgacctgggacccgcaccactacaggctcgtgcaggactcacagcctttggacctcagcaaagccctcagcagcatgcatgccaagaacgtgttcaccatgaggctcaaatctcggcagaatctacaaagtccgacatccagccgtgccaccatcctggtggaactctcctgtgaggatggccaaggcctgaactacctgccgggggagcaccttggggtttgcccaggcaaccagccggccctggtccaaggyatcctggagcgagtggtggatggccccacaccccaccagacagtgcgcctggaggccctggatgagagtggcagctactgggtcagtgacaagaggctgcccccctgctcactcagccaggccctcacctacttcctggacatcaccacacccccacccagctgctgctccaaaagctggcccaggtggccacagaaragcctgagagacgaggctggaggccctgtgccagccctcagagtacagcaagtggaagttcaccaacagccccacattcctggagytgctagaggagttcccgtccctgcgggtgtctgctggcttcctgctttcccagctccccattctgaagcccaggttctactccatcagctcctcccgggatcacacgcccacrgagatccacctgactgtggccgtggtcacctaccacacccgagatggccagggtcccctgcaccacggcgtctgcagcacatggctcaacagcctgaagccccaagacccagtgccctgctttgtgcggaaygccagcggcttccacctccccgaggatccctcccatcctygcatcctcatcgggcctggcacaggcatcgcgcccttccgcagtttctggcagcaacggctccatgactcccagcacaagggagtgcggggaggccgcatgaccttggtgtttgggtgccgccgcccagatgaggaccacatctaccaggaggagatgctggagatggcccagaagggggtgctgcatgcggtgcacacagcctattcccgcctgcctggcaagcccaaggtctatgttcaggacatcctgcggcagcagctggccagcgaggtgctccgtgtgctccacaaggagccaggccacctctatgtttgcggggatgtgcgcatggcccgggacgtggcccacaccctgaagcagctggtggctgccaagctgaaattgaatgaggagcaggtcgaggactatttctttcagctcaagagccagaagcgctatcacgaagatatctttggtgctgtatttccttacgaggcgaagaaggacagggtggcggtgcagcccagcagcctggagatgtcagcgctctgagggcctacaggaggggttaaagctgccggcacagaacttaaggatggagccagctctgcattatcygaggtcacagggcctggggagatggaggaaagtgatatcccccagcctcaaktcttatttcctcaacgttgctccccatcaagccctttacttgacctcctaacaagtagcaccctggattgatcggagcctcctctctcaaactggggcctccctggtcccttggagacraaatcttaaatgccaggcctggcaagtgggtgaaagatggaacttgctgctgagtgcaccacttcaagtgaccaccaggaggtgctatcgcaccactgtgtatttaactgccttgtgtacagttatttatgcctctgtatttaaaaaactaacacccagtctgttccccatggccacttgggtcttccctgtatgattccttgatggagatatttacatgaattgcattttactttaatcac

SEQ ID NO: 229 - DNA, 4221 bp, Homo sapiens
ataactttgtagcgagtcgaaaactgaggctccggccgcagagaactcagcctcattcctgctttaaaatctctcggccacctttgatgaggggactgggcagttctagacagtcccgaagttctcaaggcacaggtctcttcctggtttgactgtccttaccccggggaggcagtgcagccagctgcaagccccacagtgaagaacatctgagctcaaatccagataagtgacataagtgacctgctttgtaaagccatagagatggcctgtccttggaaatttctgttcaagaccaaattccaccagtatgcaatgaatggggaaaaagacatcaacaacaatgtggagaaagcyccctgtgccacctccagtccagtgacacaggatgaccttcagtatcacaacctcagcaagcagcagaatgagtccccgcagcccctcgtggagacgggaaagaagtctccrgaatctctggtcaagctggatgcaaccccattgtcctccccacggcatgtgaggatcaaaaactggggcagcgggatgactttccaagacacacttcaccataaggccaaagggattttaacttgcaggtccaaatcttgcctggggtccattatgactcccaaaagtttgaccagaggacccagggacaagcctacccctccagatgagcttctacctcaagctatcgaatttgtcaaccaatattacggctccttcaaagaggcaaaaatagaggaacatctggccagggtggaagcggtaacaaaggagatagaaacaacaggaacctaccaactgacgggagatgagctcatcttcgccaccaagcaggcctggcgcaatgccccacgctgcattgggaggatccagtggtccaacctgcaggtcttcgatgcccgcagctgttccactgccygggaaatgtttgaacacatctgcagacacgtgcgttactccaccaacaatggcaacatcaggtcggccatcaccgtgttcccccagcggagtgatggcaagcacgacttccgggtgtggaatgctcagctcatccgctatgctggctaccagatgccagatggcagcatcagaggggaccctgccaacgtggaattcactcagctgtgcatcgacctgggctggaagcccaagtacggccgcttcgatgtggtccccctggtcctgcaggccaatggccgtgaccctgagctcttygaaatcccacctgaccttgtgcttgaggtggccatggaacatcccaaatacgagtggtttcgggaactggagctaaagtggtacgccctgcctgcagtggccaacatgctgcttgaggtgggcggcctggagttcccagggtgccccttcaatggctggtacatgggcacagagatcggagtccgggacttctgtgaygtccagcgctacaacatcctggaggaagtgggcaggagaatgggcctggaaacgcacaagctggcctcgctctggaaagaccaggctgtcgttgagatcaacattgctgtgctccatagtttccagaagcagaatgtgaccatcatggaccaccactcggctgcagaatccttcatgaagtacatgcagaatgaataccggtcccgtgggggctgcccggcagactggatttggctggtccctcccatgtctgggagcatcacccccgtgtttcaccaggagatgctgaactacgtcctgtcccctttctactactatcaggtagaggcctggaaaacccatgtctggcaggacgagaagcrgagacccaagagaagagagattccattgaaagtcttggtcaaagctgtgctctttgcctgtatgctgatgcgcaagacaatggcgtcccgagtcagagtcaccatcctctttgcgacagagacaggaaaatcagaggcgctggcctgggacctgggggccttattcagctgtgccttcaaccccaaggttgtctgcatggataagtacaggctgagctgcctggaggaggaacggctgctgttggtggtgaccagtacgtttggcaatggagactgccctggcaatggagagaaactgaagaaatygctcttcatgctgaaagagctcaacaacaaattcaggtacgctgtgtttggcctcggctccagcatgtaccctcggttctgcgcctttgctcatgacattgatcagaagctgtcccacctgggggcctctcagctcaccccgatgggagaaggggatgagctcagtgggcaggaggacgccttccgcagctgggccgtgcaaaccttcaaggcagcctgtgagacgtttsatgtccgaggcaaacagcacattcagatccccaagctctacacctccaatgtgacctgggacccgcaccactacaggctcgtgcaggactcacagcctttggacctcagcaaagccctcagcagcatgcatgccaagaacgtgttcaccatgaggctcaaatctcggcagaatctacaaagtccgacatccagccgtgccaccatcctggtggaactctcctgtgaggatggccaaggcctgaactacctgccgggggagcaccttggggtttgcccaggcaaccagccggccctggtccaaggyatcctggagcgagtggtggatggccccacaccccaccagacagtgcgcctggaggccctggatgagagtggcagctactgggtcagtgacaagaggctgcccccctgctcactcagccaggccctcacctacttcctggacatcaccacacccccaacccagctgctgctccaaaagctggcccaggtggccacagaaragcctgagagacagaggctggaggccctgtgccagccctcagagtacagcaagtggaagttcaccaacagccccacattcctggagytgctagaggagttcccgtccctgcgggtgtctgctggcttcctgctttcccagctccccattctgaagcccaggttctactccatcagctcctcccgggatcacacgcccacrgagatccacctgactgtggccgtggtcacctaccacacccgagatggccagggtcccctgcaccacggcgtctgcagcacatggctcaacagcctgaagccccaagacccagtgccctgctttgtgcggaaygccagcggcttccacctccccgaggatccctcccatcctygcatcctcatcgggcctggcacaggcatcgcgcccttccgcagtttctggcagcaacggctccatgactcccagcacaagggagtgcggggaggccgcatgaccttggtgtttgggtgccgccgcccagatgaggaccacatctaccaggaggagatgctggagatggcccagaagggggtgctgcatgcggtgcacacagcctattcccgcctgcctggcaagcccaaggtctatgttcaggacatcctgcggcagcagctggccagcgaggtgctccgtgtgctccacaaggagccaggccacctctatgtttgcggggatgtgcgcatggcccgggacgtggcccacaccctgaagcagctggtggctgccaagctgaaattgaatgaggagcaggtcgaggactatttctttcagctcaagagccagaagcgctatcacgaagatatctttggtgctgtatttccttacgaggcgaagaaggacagggtggcggtgcagcccagcagcctggagatgtcagcgctctgagggcctacaggaggggttaaagctgccggcacagaacttaaggatggagccagctctgcattatcygaggtcacagggcctggggagatggaggaaagtgatatcccccagcctcaaktcttatttcctcaacgttgctccccatcaagccctttacttgacctcctaacaagtagcaccctggattgatcggagcctcctctctcaaactggggcctccctggtcccttggagacraaatcttaaatgccaggcctggcaagtgggtgaaagatggaacttgctgctgagtgcaccacttcaagtgaccaccaggaggtgctatcgcaccactgtgtatttaactgccttgtgtacagttatttatgcctctgtatttaaaaaactaacacccagtctgttccccatggccacttgggtcttccctgtatgattccttgatggagatatttacatgaattgcattttactttaatcacaaaaaaaaaaaaaaaa

SEQ ID NO: 230 - DNA, 5272 bp, Homo sapiens
aggtgacagctggagggaggagcgggggtggagccgggggaagggtggggaggggatgggctggagctccgggcagtgtgcgaggcgcacgcacaggagcctgcactctgcgtcccgcaccccagcagccgcgccatgagccggagtctcttgctcyggttcttgctgttcctgctcctgctcccgccgctccccgtcctgctcgcggacccaggggcgcccacgccagtgaatccctgttgttactatccatgccarcaccagggcatctgtgtccgcttcggccttgaccgctaccagtgtgactgcacccgcacgggctattccggccccaactgcaccatccctggcctgtggacctggctccggaattcactgcggcccagcccctctttcacccacttcctgctcactcacgggcgctggttctgggagtttgtcaatgccaccttcatccragagatgctcatgcgcctggtactcacagtgcgctccaaccttatccccagtccccccacctacaactcagcacatgactacatcagctgggagtctttctccaacgtgagctattacactcgtattctgccctctgtgcctaaagattgccccacacccatgggaaccaaagggaagaagcagttgccagatgcccagctcctggcccgccgcttcctgctcaggaggamgttcatacctgacccccaaggcaccaacctcatgtttgccttctttgcacaacacttcacccaccagttcttcaaaacttctggmaagatgggtcctggcttcaccaaggccttgggccatggggtagacctcggccacatttatggagacaatmtggagcgtcagtatcaactgcggctctttaaggatgggaaactcaagtaccaggtgctggatggagaaatgtacccgccctcggtagaagaggcgcctgtgttgatgcactacccccgaggcatcccgccccagagccagatggctgtgggccaggaggtgtttgggctgcttcctgggctcatgctgtatgccacgctctggctacgtgagcacaaccgtgtgtgtgacctgctgaaggcygagcaccccacctggggcgatgagcagcttttccagacgacccgcctcatcctcataggggagaccatcaagattgtcatcgaggagtacgtgcagcagctgagtggctatttcctgcagctgaratttgacccagagctgctgttcggtgtccagttccaataccgcaaccgcattgccatggagttcaaccatctctaccactggcaccccctcatgcctgactccttcaaggtgggctcccaggagtacagctacgagcagttcttgttcaacacctccatgttggtggactatggggttgaggccctggtggatgccttctctcgccagattgctggccggatcggtgggggcaggaacatggaccaccacrtcctgcatgtggctgtggatgtcatcagggagtctcgggagatgcggctgcagcccttcaatgagtaccgcragaggtttggcatgaaaccctacacctcyttccaggagctcgtaggagagaaggagatggcagcagagttggaggaattgtatggagacattgatgcrttggagttctacccyggactgcttcttgaaaagtgccatccaaactctatctttggggagagtatgatagagattggggctcccttttccctcaagggtctcctagggaatcccatctgttctccggagtactggaagccgagcacatttggcggcgaggtgggctttaacattgtcaagacggccacactgaagaagctggtctgcctcaacaccaagacctgtccctacgtttccttccgtgtgccggatgccagtcaggatgatgggcctgctgtggagcgaccatccacagagctctgaggggcaggaaagcagcattctggaggggagagctttgtgcttgtcattccagagtgctgaggccagggctgatggtcttaaatgctcattttctggtttggcatggtgagtgttggggytgacatttagaactttaagtctcacccattatctggaatatygtgattctgtttattcttccagaatgctgaactccttgttagcccttcagattgttaggagtggttctcatttggtctgccagaatackgggttcttagttgacaacctagaatgtcagatttctggttgatttgtaacacagtcattctaggatgtggagctactgatgaaatctgctagaaagttagggggttcttattttgcattccagaatcttgactttctgattggtgattcaaagtgttgtgttcctggctgatgatccagaacagtggctcgtatcccaaatctgtcagcatctggctgtctagaatgtggatttgattcattttcctgttcagtgagatatcatagagacggagatcctaaggtccaacaagaatgcattccctgaatctgtgcctgcactgagagggcaaggargtggggtgttcttcttgggacccccactaagaccctggtctgaggatgtagagagaacaggtgggctgtattcacgccattggttggaagctaccagagctctatccccatccaggtcttgactcatggcagctgtttctcatgaagctaataaaattcgctttctaaagttacctgttatatatctcttttggtcccatcctctaaagcagaggcaacactggaacatggctagcctttcttgtagccatggctgggcgtgctagaggttgcagcatgagactttctgctgggatccttgggcccatcactgtatagacatgctaccactggtacttcctttctccctgcgggccaggcactgcccttttcaggaagctctcttaaaatacccattgccccagacctggaagatataacattcagttcccaccatctgattaaaacaacttcctcccttacagagcatacaacagagggggcacccggggaggagagcacatactgtgttccaatttcacgcttttaattctcatttgttctcacaccaacagtgtgaagtgcgtggtataatctccatttcaaaaccaaggaagcagcctcagagtggtcgagtgacacacctcacgcaggctgagtccagagcttgtgctcctcttgattcctggtttgactcagttccaggcctgatcttgcctgtctggctcagggtcaaagacagaatggtggagtgtagcctccacctgatattcaggctactcattcagtcccaaatatgtattttcctaagtgtttactatgtgccagttcctgtaacaggtgtggggacacagcagtgagtaatcaatacagacaaggttctgcccttatggagctcacactccagtggcagacaaacagaccataaataaggaaacgatgaaataagatatatacaaggtgagtgtgacttcccttctaaccccctctgctctgtcctcccctattgcgctctcaagaccagagacccaacagcagtgatctcagggcagacagccctccactccagctctgagacccttttctcaggacctctgtaggcagcagagagagaggacagaggggtaagatgaggggttgagggaaggttcttcatgatccacactttgggcttagtatttctcaggaagagctatggcccagaaacaacaggggaaactagagttcggtctgacagtccttggggttaagtctcctgtcttatggtccagaaactcctgtttctccttagttggctggaaactgctcccatcattccttctggcctctgctgaatgcagggaatgcaatccttccctgctcttgcagttgctctgacgtagaaagatccttcgggtgctggaagtctccatgaagagcttgtgtcctgtcctttcttgcagattctatttcccctcttctgctaatacctcttactttgcttgagaatcctctcctttcttattaatttcagtcttggtggttctatcaggggtgcattctggccaaggggtgggcctgtgaatcaatcctgggcaatcagacaccctctccttaaaaactggcccgtggagactgagatcactgactctgactcatccccacagctggctctgacaagatggtccatttgttcctgcttccgagatccccagggcagcctggatccctgcccttctcaagactttagcttttccttccatccggtggcctattccaggaattcctcttttgcttaaatcagttggagtttgtgtctgttgcttgtaatmaagcctttatggctgctgggctgagtgacacaagcactttaatggcctggagggacttttaatcagtgaagatgcaatcagacaagtgttttggaaagagcaccctcgagaagggtggatgacagggcagagcaggaaggacaggaagctggcagaacggaggaggctgcagccgtggtccaaccaggagctgatggcagctggggctaggggaagggctttgagggtggaaggatgggatgggttccagaggtattcctctcttaaatgcaagtgcctagattaggtagactttgcttagtattgacaackgcacatgaaagttttgcaaagggaaacaggctaaatgcaccaagaaagcttcttcagagtgaagaatcttaatgcttgtaatttaaacatttgttcctggagttttgatttggtggatgtgatggttggttttatttgtcagtttggttgggctatagcacacagttatttaatcaaacagtaatctaggtgtggctgtgaaggtatkttgtagatgtgattaacatctacaatcagttgactttaagtgaaagagattacttaaataatttgggtgagctgcacctgattagttgaaaggcctcaagaacaaacactgcagtttcctggaaaagaagaaactttgcctcaagactatagccatcgactcctgcctgagtttccagcctgctagtctgccctatggatttgaagtttgccaaccccaacaattgtgtgaattaatttctaaaaataaagctatatacagccatcctttggtatttgtgggggatttgtttcaggatctctacagataccaaaatctgtggttcctcaagtcctttatatgaagtggtatagtatttgcatataacctatgtgcaatctcctgtataacttcaatcatctctagattacttataatacctaatacagtgtaaatgctagtt

SEQ ID NO: 231 - DNA, 5161 bp, Homo sapiens
aggtgacagctggagggaggagcgggggtggagccgggggaagggtggggaggggatgggctggagctccgggcagtgtgcgaggcgcacgcacaggagcctgcactctgcgtcccgcaccccagcagccgcgccatgagccggagtctcttgctcyggttcttgctgttcctgctcctgctcccgccgctccccgtcctgctcgcggacccaggggcgcccacgccagtgaatccctgttgttactatccatgccarcaccagggcatctgtgtccgcttcggccttgaccgctaccagtgtgactgcacccgcacgggctattccggccccaactgcaccatccctggcctgtggacctggctccggaattcactgcggcccagcccctctttcacccacttcctgctcactcacgggcgctggttctgggagtttgtcaatgccaccttcatccragagatgctcatgcgcctggtactcacagtgcgctccaaccttatccccagtccccccacctacaactcagcacatgactacatcagctgggagtctttctccaacgtgagctattacactcgtattctgccctctgtgcctaaagattgccccacacccatgggaaccaaagggaagaagcagttgccagatgcccagctcctggcccgccgcttcctgctcaggaggamgttcatacctgacccccaaggcaccaacctcatgtttgccttctttgcacaacacttcacccaccagttcttcaaaacttctggmaagatgggtcctggcttcaccaaggccttgggccatggggtagacctcggccacatttatggagacaatmtggagcgtcagtatcaactgcggctctttaaggatgggaaactcaagtaccaggtgctggatggagaaatgtacccgccctcggtagaagaggcgcctgtgttgatgcactacccccgaggcatcccgccccagagccagatggctgtgggccaggaggtgtttgggctgcttcctgggctcatgctgtatgccacgctctggctacgtgagcacaaccgtgtgtgtgacctgctgaaggcygagcaccccacctggggcgatgagcagcttttccagacgacccgcctcatcctcataggggagaccatcaagattgtcatcgaggagtacgtgcagcagctgagtggctatttcctgcagctgaratttgacccagagctgctgttcggtgtccagttccaataccgcaaccgcattgccatggagttcaaccatctctaccactggcaccccctcatgcctgactccttcaagatcggtgggggcaggaacatggaccaccacrtcctgcatgtggctgtggatgtcatcagggagtctcgggagatgcggctgcagcccttcaatgagtaccgcragaggtttggcatgaaaccctacacctcyttccaggagctcgtaggagagaaggagatggcagcagagttggaggaattgtatggagacattgatgcrttggagttctacccyggactgcttcttgaaaagtgccatccaaactctatctttggggagagtatgatagagattggggctcccttttccctcaagggtctcctagggaatcccatctgttctccggagtactggaagccgagcacatttggcggcgaggtgggctttaacattgtcaagacggccacactgaagaagctggtctgcctcaacaccaagacctgtccctacgtttccttccgtgtgccggatgccagtcaggatgatgggcctgctgtggagcgaccatccacagagctctgaggggcaggaaagcagcattctggaggggagagctttgtgcttgtcattccagagtgctgaggccagggctgatggtcttaaatgctcattttctggtttggcatggtgagtgttggggytgacatttagaactttaagtctcacccattatctggaatatygtgattctgtttattcttccagaatgctgaactccttgttagcccttcagattgttaggagtggttctcatttggtctgccagaatackgggttcttagttgacaacctagaatgtcagatttctggttgatttgtaacacagtcattctaggatgtggagctactgatgaaatctgctagaaagttagggggttcttattttgcattccagaatcttgactttctgattggtgattcaaagtgttgtgttcctggctgatgatccagaacagtggctcgtatcccaaatctgtcagcatctggctgtctagaatgtggatttgattcattttcctgttcagtgagatatcatagagacggagatcctaaggtccaacaagaatgcattccctgaatctgtgcctgcactgagagggcaaggargtggggtgttcttcttgggacccccactaagaccctggtctgaggatgtagagagaacaggtgggctgtattcacgccattggttggaagctaccagagctctatccccatccaggtcttgactcatggcagctgtttctcatgaagctaataaaattcgctttctaaagttacctgttatatatctcttttggtcccatcctctaaagcagaggcaacactggaacatggctagcctttcttgtagccatggctgggcgtgctagaggttgcagcatgagactttctgctgggatccttgggcccatcactgtatagacatgctaccactggtacttcctttctccctgcgggccaggcactgcccttttcaggaagctctcttaaaatacccattgccccagacctggaagatataacattcagttcccaccatctgattaaaacaacttcctcccttacagagcatacaacagagggggcacccggggaggagagcacatactgtgttccaatttcacgcttttaattctcatttgttctcacaccaacagtgtgaagtgcgtggtataatctccatttcaaaaccaaggaagcagcctcagagtggtcgagtgacacacctcacgcaggctgagtccagagcttgtgctcctcttgattcctggtttgactcagttccaggcctgatcttgcctgtctggctcagggtcaaagacagaatggtggagtgtagcctccacctgatattcaggctactcattcagtcccaaatatgtattttcctaagtgtttactatgtgccagttcctgtaacaggtgtggggacacagcagtgagtaatcaatacagacaaggttctgcccttatggagctcacactccagtggcagacaaacagaccataaataaggaaacgatgaaataagatatatacaaggtgagtgtgacttcccttctaaccccctctgctctgtcctcccctattgcgctctcaagaccagagacccaacagcagtgatctcagggcagacagccctccactccagctctgagacccttttctcaggacctctgtaggcagcagagagagaggacagaggggtaagatgaggggttgagggaaggttcttcatgatccacactttgggcttagtatttctcaggaagagctatggcccagaaacaacaggggaaactagagttcggtctgacagtccttggggttaagtctcctgtcttatggtccagaaactcctgtttctccttagttggctggaaactgctcccatcattccttctggcctctgctgaatgcagggaatgcaatccttccctgctcttgcagttgctctgacgtagaaagatccttcgggtgctggaagtctccatgaagagcttgtgtcctgtcctttcttgcagattctatttcccctcttctgctaatacctcttactttgcttgagaatcctctcctttcttattaatttcagtcttggtggttctatcaggggtgcattctggccaaggggtgggcctgtgaatcaatcctgggcaatcagacaccctctccttaaaaactggcccgtggagactgagatcactgactctgactcatccccacagctggctctgacaagatggtccatttgttcctgcttccgagatccccagggcagcctggatccctgcccttctcaagactttagcttttccttccatccggtggcctattccaggaattcctcttttgcttaaatcagttggagtttgtgtctgttgcttgtaatmaagcctttatggctgctgggctgagtgacacaagcactttaatggcctggagggacttttaatcagtgaagatgcaatcagacaagtgttttggaaagagcaccctcgagaagggtggatgacagggcagagcaggaaggacaggaagctggcagaacggaggaggctgcagccgtggtccaaccaggagctgatggcagctggggctaggggaagggctttgagggtggaaggatgggatgggttccagaggtattcctctcttaaatgcaagtgcctagattaggtagactttgcttagtattgacaackgcacatgaaagttttgcaaagggaaacaggctaaatgcaccaagaaagcttcttcagagtgaagaatcttaatgcttgtaatttaaacatttgttcctggagttttgatttggtggatgtgatggttggttttatttgtcagtttggttgggctatagcacacagttatttaatcaaacagtaatctaggtgtggctgtgaaggtatkttgtagatgtgattaacatctacaatcagttgactttaagtgaaagagattacttaaataatttgggtgagctgcacctgattagttgaaaggcctcaagaacaaacactgcagtttcctggaaaagaagaaactttgcctcaagactatagccatcgactcctgcctgagtttccagcctgctagtctgccctatggatttgaagtttgccaaccccaacaattgtgtgaattaatttctaaaaataaagctatatacagccatcctttggtatttgtgggggatttgtttcaggatctctacagataccaaaatctgtggttcctcaagtcctttatatgaagtggtatagtatttgcatataacctatgtgcaatctcctgtataacttcaatcatctctagattacttataatacctaatacagtgtaaatgctagtt

SEQ ID NO: 232 - DNA, 2368 bp, Homo sapiens
gtcccgggaatcgcacaggacccggctcccctcgcctaagctgctggggggcgccatgggccgctaccgcatccgcgtggccaccggggcctggctcttctccgggtcgtacaaccgcgtgcagctttggctggtcgggacgcgcggggaggcggagctggagctgcagctgcggccggcgcggggcgaggaggaggagtttgatcatgacgttgcagaggacttggggctcctgcagttcgtgaggctgcgcaagcaccactggctggtggacgacgcgtggttctgcgaccgcatcacggtgcagggccctggagcctgcgcggaggtggccttcccgtgctaccgctgggtgcagggcgaggacatcctgagcctgcccgagggcaccgcccgcctgccaggagacaatgctttggacatgttccagaagcatcgagagaaggaactgaaagacagacagcagatctactgctgggccacctggaaggaagggttacccctgaccatcgctgcagaccgtaaggatgatctacctccaaatatgagattccatgaggagaagaggctggactttgaatggacactgaaggcaggggctctggagatggccctcaaacrtgtttacaccctcctgagctcctggaactgcctagaagactttgatcagatcttctggggccagaagagtgccctggctgagaaggttcgccagtgctggcaggatgatgagttgttcagctaccagttcctcaatggtgccaaccccatgctgttgagacgctcgacctctctgccctccaggctagtgctgccctcrgggatggaagagcttcrggctcaactggagaaagaacttcagaatggttccctgtttgaagctgacttcatccttctggatggaattccagccaacgtgatccgaggagagaagcaatacctggctgcccccctcgttatgctgaagatggagcccaatgggaagctgcagcccatggtcatccagattcagcctcccarccccagctctccaaccccaacactgttcctgccctcagaccccccacttgcctggctcctggcaaagtcctgggtccgaaattcagatttccaactgcacgagatccagtatcacttgctgaacackcacctggtggctgaggtcatcgctgtcgccaccatgcggtgcctcccaggactgcaccccatcttcaagttcctgatcccccatatccgctacaccatggaaatcaacacccgggcccggacccaactcatctcagatggaggaatttttgataaggcagtgagcacaggtggagggggccatgtacagttgctccgtcgggcggcagctcagctgacctactgctccctctgtcctcctgacgacctggctgaccggggcctgctgggactcccaggtgctctctatgcccatgatgctttacggctctgggagatcattgccaggtatgtggaggggatcgtccacctcttctaccaragggatgacatagtgaagggggaccctgagctgcaggcctggtgtcgggagatcacggaggtggggctgtgccaggcccaggaccgaggtttccctgtctccttccagtcccagagtcaactctgccatttcctcaccatgtgcgtcttcacgtgcactgcccagcatgccgccatcaaccagggccagctggactggtatgcctgggtccctaatgctccatgcacaatgcggatgcccccacccaccaccaaggaagatgtgacgatggccacagtgatggggtcactacctgatgtccggcaggcctgtcttcaaatggccatctcatggcatytgagtcgccgccagccagacatggtgcctctggggcaccacaaagaaaaatatttctcaggccccaagcccaaagctgtgctaaaccaattccgaacagatttggaaaagctrgaaaaggagattacagcccggaatgagcaacttgactggccctatgaatatctgaagcccagctgyatagagaacagtgtcaccatctgagccctagagtgactctacctgcaagatttcacatcagctttaggactgacatttctatcttgaatttcatgctttcctaaagtctctgctgctaaggctctatttcctcccccagttaaaccccctacattagtatcccactagcccaggggagcagtaaactttctctgcaaagactagatccttttttacgctttgcagaccgcatagtcactgtctcaactactcagctctcctgctgcagcatgaaggcagccacagacaacatggaaatgagtgtgactatgttccaataaaactttatggacactgagatatgaa

SEQ ID NO: 233 - DNA, 2867 bp, Homo sapiens
gagatagagtctgatctggaggctggaaggcggggctaaaactcccactcacttacctctaccaacaactaggccaccaagtcatttctgaggactggctcaagaaagcagatttaacttacactggcctagcccaggccaccagatgcatccacggagatccaaatgcatataatcacttgaatcaagatctagacagggacgcgtgcagcaggcttcatctgactgattcctgacacgggagagaaagcctaagctccgaatcatccttcaatgtttacaaaggccctaaatagcagtgggctaattgctgttcctggatttccaggagacctgagacccatgaaggagcaggaaagagcttggggataaaaaattaatctggaacctactggagcggaaggggctgcactcacctggaaaagacaaagttcttgggaactggccacgtaggccaggtccctaagcaattccatcccgcaccctaacaccccgactggtcccgggaatcgcacaggacccggctcccctcgcctaagctgctggggggcgccatgggccgctaccgcatccgcgtggccaccggggcctggctcttctccgggtcgtacaaccgcgtgcagctttggctggtcgggacgcgcggggaggcggagctggagctgcagctgcggccggcgcggggcgaggaggaggagtttgatcatgacgttgcagaggacttggggctcctgcagttcgtgaggctgcgcaagcaccactggctggtggacgacgcgtggttctgcgaccgcatcacggtgcagggccctggagcctgcgcggaggtggccttcccgtgctaccgctgggtgcagggcgaggacatcctgagcctgcccgagggcaccgcccgcctgccaggagacaatgctttggacatgttccagaagcatcgagagaaggaactgaaagacagacagcagatctactgctgggccacctggaaggaagggttacccctgaccatcgctgcagaccgtaaggatgatctacctccaaatatgagattccatgaggagaagaggctggactttgaatggacactgaaggcaggggctctggagatggccctcaaacrtgtttacaccctcctgagctcctggaactgcctagaagactttgatcagatcttctggggccagaagagtgccctggctgagaaggttcgccagtgctggcaggatgatgagttgttcagctaccagttcctcaatggtgccaaccccatgctgttgagacgctcgacctctctgccctccaggctagtgctgccctcrgggatggaagagcttcrggctcaactggagaaagaacttcagaatggttccctgtttgaagctgacttcatccttctggatggaattccagccaacgtgatccgaggagagaagcaatacctggctgcccccctcgttatgctgaagatggagcccaatgggaagctgcagcccatggtcatccagattcagcctcccarccccagctctccaaccccaacactgttcctgccctcagaccccccacttgcctggctcctggcaaagtcctgggtccgaaattcagatttccaactgcacgagatccagtatcacttgctgaacackcacctggtggctgaggtcatcgctgtcgccaccatgcggtgcctcccaggactgcaccccatcttcaagttcctgatcccccatatccgctacaccatggaaatcaacacccgggcccggacccaactcatctcagatggaggaatttttgataaggcagtgagcacaggtggagggggccatgtacagttgctccgtcgggcggcagctcagctgacctactgctccctctgtcctcctgacgacctggctgaccggggcctgctgggactcccaggtgctctctatgcccatgatgctttacggctctgggagatcattgccaggtatgtggaggggatcgtccacctcttctaccaragggatgacatagtgaagggggaccctgagctgcaggcctggtgtcgggagatcacggaggtggggctgtgccaggcccaggaccgaggtttccctgtctccttccagtcccagagtcaactctgccatttcctcaccatgtgcgtcttcacgtgcactgcccagcatgccgccatcaaccagggccagctggactggtatgcctgggtccctaatgctccatgcacaatgcggatgcccccacccaccaccaaggaagatgtgacgatggccacagtgatggggtcactacctgatgtccggcaggcctgtcttcaaatggccatctcatggcatytgagtcgccgccagccagacatggtgcctctggggcaccacaaagaaaaatatttctcaggccccaagcccaaagctgtgctaaaccaattccgaacagatttggaaaagctrgaaaaggagattacagcccggaatgagcaacttgactggccctatgaatatctgaagcccagctgyatagagaacagtgtcaccatctgagccctagagtgactctacctgcaagatttcacatcagctttaggactgacatttctatcttgaatttcatgctttcctaaagtctctgctgctaaggctctatttcctcccccagttaaaccccctacattagtatcccactagcccaggggagcagtaaactttctctgcaaagactagatccttttttacgctttgcagaccgcatagtcactgtctcaactactcagctctcctgctgcagcatgaaggcagccacagacaacatggaaatgagtgtgactatgttccaataaaactttatggacactgagatatgaa

SEQ ID NO: 234 - DNA, 2589 bp, Homo sapiens
cagacacggtcgcctccacatccaggtctttgtgctcctcgcttgcctgttccttttccacgcattttccaggataacttccttgcttccaggccckcaatggatgccctgcaactagcaaattcggcttttgcygttgatctgttcaaacaactatgtgaaaaggagccactgggcaatgtcctcttctctccaatctgtctctccacctctctgtcacttgctcaagtgggtgctaaaggtgacactgcaaatgaaattggacaggttcttcattttgaaaatgtcaaagatrtaccctttggatttcaaacagtaacatcggatgtaaacaaacttagttccttttactcactgaaactaatmaagcggctctacgtagacaaatctctgaatctttctacagagttcatcagctctacgaagagaccstatgcaaaggaattggaaactgttgacttcaaagataaattggaagaaacgaaaggtcagatcaacaactcaattaaggatctcacagatggccactttgagaacattttagctgacaacagtgtgaacgaccagaccaaaatccttgtggttaatgctgcctactttgttggcaartggatgaagaaatttyctgaatcagaaacaaaagaatgtcctttcagastcaacaagacagacaccaaaccagtgcagatgatgaacatggaggccacgttctgtatgggaaacattgacagtatcaattgtaagatcatagagcttccttttcaaaataagcatctcagcatgttcatcctactacccaaggatgtggaggatgagtccacaggcttggagaagattgaaaaacaactcaactcagagtcactgtcacagtggactaatcccagcaccatggccaatgccaaggtcaaactctccattccaaaatttaaggtggaaaagatgattgatcccaaggcttgtctggaaaatctagggctgaaacatatcttcagygaagacacatctgatttctctggaatgtcagagaccaagggagtggccctatcaaatgttrtccacaaagtgtgcttagaaataactgaagatggtggggattccatagaggtgccaggagcacggatcctgcagcacaaggatgaattgaatgctgaccatccctttatttacatcatcaggcacaacaaaactcgaaacatcattttctttggcaaattctgttctccttaagtggcatagcccatgttaagtcctccctgacttttctgtggatgccgatttctgtaaactctgcatccagagattcattttctagatacaataaattgctaatgttgctggatcaggaagccgccagtacttgtcatatgtagccttcacacagatagaccttttttttttttccaattctatcttttgtttccttttttcccataagacaatgacatacgcttttaatgaaaaggaatcacgttagaggaaaaatatttattcattatttgtcaaattgtccggggtagttggcagaaatacagtcttccacaaagaaaattcctataaggaagatttggaagctcttcttcccagcactatgcyttccttctttgggatagagaatgttccagacattctcgcttccctgaaagactgaagaaagtgtagtgcatgggacccacgaaactgccctggctccagtgaaacttgggcacatgctcaggctactataggtccagaagtccttatgttaagccctggcaggcaggtgtttattaaaattctgaattttggggattttcaaaagataatattttacatacactgtatgttatagaacttcatggatcagatctggggcagcaccctahaaatcamcaccttaatatgctgcaacaaaatgtagaatattcagacaaaatggatacataaagactaagtagcccataaggggtcaaaatttgctgccaaatgcgtatgccaccaacttacaaaaacacttcgttcgcagagcttttcagattgtggaatgttggataaggaattatagacctctagtagctgaaatgcaagaccccaagaggaagttcagatcttaatataaattcactttcatttttgatagctgtcccatctggtcatttggttggcactagactggtggcaggggcttctagctgacttgcacagggattctcacaatagccgatatcagaatttgtgttgaaggaacttgtctcttcatctaatatgatagcgggaaaaggagaggaaactactgcctttagaaaatataagtaaagtgattaaagtgctcacgttaccttgacacatagtttttcagtctatgggtttagttactttagatggcaagcatgtaacttatattaatagtaatttgtaaagttggttggataagctatccrtgttgcaggttcatggattacttctctataaaaaatatgtatttaccaaaaattttgtgacattccttctcccatctcttccttgacmtgcattgtaaatagsttcttcttgttctgagattcaatattgaatttttcctatgctattgacaataaaatattattgaactac

SEQ ID NO: 235 - DNA, 2593 bp, Homo sapiens
cagacacggtcgcctccacatccaggtctttgtgctcctcgcttgcctgttccttttccacgcattttccaggataacttccttgcttccaggccckcaatggatgccctgcaactagcaaattcggcttttgcygttgatctgttcaaacaactatgtgaaaaggagccactgggcaatgtcctcttctctccaatctgtctctccacctctctgtcacttgctcaagtgggtgctaaaggtgacactgcaaatgaaattggacaggttcttcattttgaaaatgtcaaagatrtaccctttggatttcaaacagtaacatcggatgtaaacaaacttagttccttttactcactgaaactaatmaagcggctctacgtagacaaatctctgaatctttctacagagttcatcagctctacgaagagaccstatgcaaaggaattggaaactgttgacttcaaagataaattggaagaaacgaaaggtcagatcaacaactcaattaaggatctcacagatggcaagccactttgagaacattttagctgacaacagtgtgaacgaccagaccaaaatccttgtggttaatgctgcctactttgttggcaartggatgaagaaatttyctgaatcagaaacaaaagaatgtcctttcagastcaacaagacagacaccaaaccagtgcagatgatgaacatggaggccacgttctgtatgggaaacattgacagtatcaattgtaagatcatagagcttccttttcaaaataagcatctcagcatgttcatcctactacccaaggatgtggaggatgagtccacaggcttggagaagattgaaaaacaactcaactcagagtcactgtcacagtggactaatcccagcaccatggccaatgccaaggtcaaactctccattccaaaatttaaggtggaaaagatgattgatcccaaggcttgtctggaaaatctagggctgaaacatatcttcagygaagacacatctgatttctctggaatgtcagagaccaagggagtggccctatcaaatgttrtccacaaagtgtgcttagaaataactgaagatggtggggattccatagaggtgccaggagcacggatcctgcagcacaaggatgaattgaatgctgaccatccctttatttacatcatcaggcacaacaaaactcgaaacatcattttctttggcaaattctgttctccttaagtggcatagcccatgttaagtcctccctgacttttctgtggatgccgatttctgtaaactctgcatccagagattcattttctagatacaataaattgctaatgttgctggatcaggaagccgccagtacttgtcatatgtagccttcacacagatagaccttttttttttttccaattctatcttttgtttccttttttcccataagacaatgacatacgcttttaatgaaaaggaatcacgttagaggaaaaatatttattcattatttgtcaaattgtccggggtagttggcagaaatacagtcttccacaaagaaaattcctataaggaagatttggaagctcttcttcccagcactatgcyttccttctttgggatagagaatgttccagacattctcgcttccctgaaagactgaagaaagtgtagtgcatgggacccacgaaactgccctggctccagtgaaacttgggcacatgctcaggctactataggtccagaagtccttatgttaagccctggcaggcaggtgtttattaaaattctgaattttggggattttcaaaagataatattttacatacactgtatgttatagaacttcatggatcagatctggggcagcaccctahaaatcamcaccttaatatgctgcaacaaaatgtagaatattcagacaaaatggatacataaagactaagtagcccataaggggtcaaaatttgctgccaaatgcgtatgccaccaacttacaaaaacacttcgttcgcagagcttttcagattgtggaatgttggataaggaattatagacctctagtagctgaaatgcaagaccccaagaggaagttcagatcttaatataaattcactttcatttttgatagctgtcccatctggtcatttggttggcactagactggtggcaggggcttctagctgacttgcacagggattctcacaatagccgatatcagaatttgtgttgaaggaacttgtctcttcatctaatatgatagcgggaaaaggagaggaaactactgcctttagaaaatataagtaaagtgattaaagtgctcacgttaccttgacacatagtttttcagtctatgggtttagttactttagatggcaagcatgtaacttatattaatagtaatttgtaaagttggttggataagctatccrtgttgcaggttcatggattacttctctataaaaaatatgtatttaccaaaaattttgtgacattccttctcccatctcttccttgacmtgcattgtaaatagsttcttcttgttctgagattcaatattgaatttttcctatgctattgacaataaaatattattgaactac

SEQ ID NO: 236 - DNA, 2635 bp, Homo sapiens
ggcagtgggcgtggcggtgctgcccaggtgagccaccgctgcttctgcccagacacggtcgcctccacatccaggtctttgtgctcctcgcttgcctgttccttttccacgcattttccaggataactgtgactccaggccckcaatggatgccctgcaactagcaaattcggcttttgcygttgatctgttcaaacaactatgtgaaaaggagccactgggcaatgtcctcttctctccaatctgtctctccacctctctgtcacttgctcaagtgggtgctaaaggtgacactgcaaatgaaattggacaggttcttcattttgaaaatgtcaaagatrtaccctttggatttcaaacagtaacatcggatgtaaacaaacttagttccttttactcactgaaactaatmaagcggctctacgtagacaaatctctgaatctttctacagagttcatcagctctacgaagagaccstatgcaaaggaattggaaactgttgacttcaaagataaattggaagaaacgaaaggtcagatcaacaactcaattaaggatctcacagatggccactttgagaacattttagctgacaacagtgtgaacgaccagaccaaaatccttgtggttaatgctgcctactttgttggcaartggatgaagaaatttyctgaatcagaaacaaaagaatgtcctttcagastcaacaagacagacaccaaaccagtgcagatgatgaacatggaggccacgttctgtatgggaaacattgacagtatcaattgtaagatcatagagcttccttttcaaaataagcatctcagcatgttcatcctactacccaaggatgtggaggatgagtccacaggcttggagaagattgaaaaacaactcaactcagagtcactgtcacagtggactaatcccagcaccatggccaatgccaaggtcaaactctccattccaaaatttaaggtggaaaagatgattgatcccaaggcttgtctggaaaatctagggctgaaacatatcttcagygaagacacatctgatttctctggaatgtcagagaccaagggagtggccctatcaaatgttrtccacaaagtgtgcttagaaataactgaagatggtggggattccatagaggtgccaggagcacggatcctgcagcacaaggatgaattgaatgctgaccatccctttatttacatcatcaggcacaacaaaactcgaaacatcattttctttggcaaattctgttctccttaagtggcatagcccatgttaagtcctccctgacttttctgtggatgccgatttctgtaaactctgcatccagagattcattttctagatacaataaattgctaatgttgctggatcaggaagccgccagtacttgtcatatgtagccttcacacagatagaccttttttttttttccaattctatcttttgtttccttttttcccataagacaatgacatacgcttttaatgaaaaggaatcacgttagaggaaaaatatttattcattatttgtcaaattgtccggggtagttggcagaaatacagtcttccacaaagaaaattcctataaggaagatttggaagctcttcttcccagcactatgcyttccttctttgggatagagaatgttccagacattctcgcttccctgaaagactgaagaaagtgtagtgcatgggacccacgaaactgccctggctccagtgaaacttgggcacatgctcaggctactataggtccagaagtccttatgttaagccctggcaggcaggtgtttattaaaattctgaattttggggattttcaaaagataatattttacatacactgtatgttatagaacttcatggatcagatctggggcagcaccctahaaatcamcaccttaatatgctgcaacaaaatgtagaatattcagacaaaatggatacataaagactaagtagcccataaggggtcaaaatttgctgccaaatgcgtatgccaccaacttacaaaaacacttcgttcgcagagcttttcagattgtggaatgttggataaggaattatagacctctagtagctgaaatgcaagaccccaagaggaagttcagatcttaatataaattcactttcatttttgatagctgtcccatctggtcatttggttggcactagactggtggcaggggcttctagctgacttgcacagggattctcacaatagccgatatcagaatttgtgttgaaggaacttgtctcttcatctaatatgatagcgggaaaaggagaggaaactactgcctttagaaaatataagtaaagtgattaaagtgctcacgttaccttgacacatagtttttcagtctatgggtttagttactttagatggcaagcatgtaacttatattaatagtaatttgtaaagttggttggataagctatccrtgttgcaggttcatggattacttctctataaaaaatatgtatttaccaaaaattttgtgacattccttctcccatctcttccttgacmtgcattgtaaatagsttcttcttgttctgagattcaatattgaatttttcctatgctattgacaataaaatattattgaactac

SEQ ID NO: 237 - DNA, 796 bp, Homo sapiens
cagacacggtcgcctccacatccaggtctttgtgctcctcgcttgcctgttccttttccacgcattttccaggataacttccttgcttccaggccckcaatggatgccctgcaactagcaaattcggcttttgcygttgatctgttcaaacaactatgtgaaaaggagccactgggcaatgtcctcttctctccaatctgtctctccacctctctgtcacttgctcaagtgggtgctaaaggtgacactgcaaatgaaattggacaggttcttcattttgaaaatgtcaaagatrtaccctttggatttcaaacagtaacatcggatgtaaacaaacttagttccttttactcactgaaactaatmaagcggctctacgtagacaaatctctgaatctttctacagagttcatcagctctacgaagagaccstatgcaaaggaattggaaactgttgacttcaaagataaattggaagaaacgaaaggtcagatcaacaactcaattaaggatctcacagatggcaagccactttgagaacattttagctgacaacagtgtgaacgaccagaccaaaatccttgtggttaatgctgcctactttgttggcaartggatgaagaaatttyctgaatcagaaacaaaagaatgtcctttcagastcaacaaggtatgtggggcagcrtgtagcagtaaaaggagcccaattatagatgtgaaaaatgayagggacagagtggggcataaatccattccaatgaggaacctgagggcacggccggcaaagtgcctttcc

SEQ ID NO: 238 - DNA, 570 bp, Homo sapiens
ctgacctctggccgctattcgaagggaagggagccccctataaaacagcctacagtggacagtctggtcggcagagccgcaggtcagtcgtgaagagggagctctattgccaccatgagtttctccggcaagtaccaactgcagagccaggaaaactttgaagccttcatgaaggcaatcggtctgccggaagagctcatccagaaggggaaggatatcaagggggtgtcggaaatcvtkcagaatgggaagcacttcaagttcaccatcaccrctgggtccaaagtgatccaaaacgaattcacggtgggggaggaatgtgagctggagacaatgacaggggagaaagtcaagacagtggttcagttggaaggtgacaataaactggtgacarctttcaaaaacatcaagtctgtgaccgaactcaacggcgacataatcaccaataccatgacattgggtgacattgtcttcaagagaatcagcaagagaatttaaasaagtctgcatttcatattattttagtgtgtaaaattaatgtaataaagtgaactttgttttaaaaaaaaa

SEQ ID NO: 239 - DNA, 2215 bp, Homo sapiens
ctgacctctggccgctattcgaagggaagggagccccctataaaacagcctacagtggacagtctggtcggcagagccgcaggtcagtcgtgaagagggagctctattgccaccatgagtttctccggcaagtaccaactgcagagccaggaaaactttgaagccttcatgaaggcaatcggtctgccggaagagctcatccagaaggggaaggatatcaagggggtgtcggaaatcvtkcagaatgggaagcacttcaagttcaccatcaccrctgggtccaaagtgatccaaaacgaattcacggtgggggaggaatgtgagctggagacaatgacaggggagaaagtcaaggtaggagggcatcccttctgctgtcagaactttccttggaacctggccctgggacctcattcctcaaggctcaaacctcacaattccacccacagataccatctctgaacccacctcccatgtgggagaagcagagagacaaaggcagctcttagggaagaatcttatagagaagctgctctcctcttcccagggactgtctggggggtgttccagcccctaaagtctgagctctcccatatggaggatatgggagaaccaggcatacagcaggattctaagtctcaggttctcccaggcccagtgctcctagcactaagagtcctctaagcagggcccaggagtggggcaagtgggagtttgtgaaaaacccttaactgagcccaaagtcaactggccttcactgaacctagagctggtggtgatagggagagacttcttgaaggaggtgctagcaataccagaataccagggccccagacaggtgctcagaccctgccttcaggggtggtcacaaagtctctggcttcagccaccccatctgtaaaataagaacagtcaacctccctagactgaaggcagtgcagggcagcatcacttctgctgggcacaactcatggtgtgcaatgacagctggggtgtgggctgtgtgagtggttggcagatggtggcagggggatcctggcaatgggggtgcccgtctcctcctccctctgaaacactccatgctctagcagccctcttctctcctccccgtggacagctctgttcattgggctgggcgtgtttgctttttatctcttctggtcactctttatttctgcctctccaattagaacattacaggtcaggatgattttaggaggataatattcttgatgtgctcatggtcaagggatttaactatgggccttttccaaattttctttttggaggcaaaatgtttaatgttgcccagggtctttggctccctgctgggttcctgtcrtctcttccaggatgtataagggcttggaaggaggccacaatatgaaaagttaacgctctgggaagaataatacatacctggttgggcgggtggctcatgcctacaatcccagcactttgggaggctgaagtgaaaggactgtttgagcctaggagttcaagaccagcctgggcaacatagcaagacctcatctcaattaaaaaaaaaaaaaaaagaagaatacataccaaagcaaaatatgtattctctactggtcaatatttgaattttgccactacctccctccattagcttgggagaattgagattttacttgatttgattttagcatttgtatttggggccacttaggtgttccatgctcatttctagatcacatgccatgaattaaagttctgacaaaagaagtcgtgacattttatttagttcttaaatgcacctcacttctatttggagccagagaactagaggcttgggatcataggaaccagagcattttggttgttatgagctgagacctgtgcaaaggaagcaacttcattagcaaggctcttgccccccaccaccccttcctcacaggtcacctctctgttccctgcagacagtggttcagttggaaggtgacaataaactggtgacarctttcaaaaacatcaagtctgtgaccgaactcaacggcgacataatcaccaatgtaagttggtggtgctctgagcgtgtggctcccagtgcttgaggggagaggggaggtgaagcatggggagcggctcacataccctaatgccacccctccaccctycaacccccaaacttctttcctgtggtcagtatctgccagcactwactgaggatccatcatgtcccaggcagttt

SEQ ID NO: 240 - DNA, 6377 bp, Homo sapiens
tgcgcaagcgccgtgctcctcccacggcagttggccatatagaggctgggggtggggggggaggtcaagcgtagcctcttctcctttcaaaagctggcaggctgacagaggcggcctcaggacggaccttctggctactgaccgttttgctgtggttttcccggattgtgtgtaggtgtgagatcaaccatgagttccgttgcagttttgacccaagagagttttgctgaacaccgaagtgggctggttccgcaacaaatcaaagttgccactctaaattcagaagaggagagcgaccctccaacctacaaggatgccttccctccacttcctgagaaagctgcttgcctggaaagtgcccaggaacccgctggagcctgggggaacaagatccgacccatcaaggcttctgtcatcactcaggtgttccatgtacccctggaggagagaaaatacaaggatatgaaccagtttggagaaggtgaacaagcaaaaatctgccttgagatcatgcagagaactggtgctcacttggagctgtctttggccaaagaccaaggcctctccatcatggtgtcaggaaagctggatgctgtcatgaaagctcggaaggacattgttgctagactgcagactcaggcctcagcaactgttgccattcccaaagaacaccatcgctttgttattggcaaaaatggagagaaactgcaagacttggagctaaaaactgcaaccaaaatccagatcccacgcccagatgaccccagcaatcagatcaagatcactggcaccaaagagggcatcgagaaagctcgccatgaagtcttactcatctctgccgagcaggacaaacgtgctgtggagaggctagaagtagaaaaggcattccaccccttcatcgctgggccgtataatagactggttggcgagatcatgcaggagacaggcacgcgcatcaacatccccccacccagcgtgaaccggacagagattgtcttcactggagagaaggaacagttggctcaggctgtggctcgcatcaagaagatttatgaggagaagaaaaagaagactacaaccattgcagtggaagtgaagaaatcccaacacaagtatgtcattgggcccaagggcaattcattgcaggagatccttgagagaactggagtttccgttgagatcccaccctcagacagcatctctgagactgtaatacttcgaggcgaacctgaaaagttaggtcaggcgttgactgaagtctatgccaaggccaatagcttcaccgtctcctctgtcgccgccccttcctggcttcaccgtttcatcattggcaagaaagggcagaacctggccaaaatcactcagcagatgccaaaggttcacatcgagttcacagagggcgaagacaagatcaccctggagggccctacagaggatgtcartgtggcccaggaacagatagaaggcatggtcaaagatttgattaaccggatggactatgtggagatcaacatcgaccacaagttccacaggcacctcattgggaagagcggtgccaacataaacagaatcaaagaycagtacaaggtgtccgtgcgcatccctcctgacagtgagaagagcaatttgatccgcatcgagggggacccacagggcgtgcagcaggccaagcgagagctgctggagcttgcatctcgcatggaaaatgagcgtaccaaggatctaatcattgagcaaagatttcatcgcacaatcattgggcagaagggtgaacggatccgtgaaattcgtgacaaattcccagaggtcatcattaactttccagacccagcacaaaaaagtgacattgtccagctcagaggacctaagaatgaggtggaaaaatgcacaaaatacatgcagaagatggtggcagatctggtggaaaatagctattcaatttctgttccgatcttcaaacagtttcacaagaatatcattgggaaaggaggcgcaaacattaaaaagattcgtgaagaaagcaacaccaaaatcgaccttccagcagagaatagcaattcagagaccattatcatcacaggcaagcgagccaactgcgaagctgcccggagcaggattctgtctattcagaaagacctggccaacatagccgaggtagaggtctccatccctgccaagctgcacaactccctcattggcaccaagggccgtctgatccgctccatcatggaggagtgcggcggggtccacattcactttcccgtggaaggttcaggaagcgacaccgttgttatcaggggcccttcctcggatgtggagaaggccaagaagcagctcctgcatctggcggaggagaagcaaaccaagagtttcactgttgacatccgcgccaagccagaataccacaaattcctcatcggcaaggggggcggcaaaattcgcaaggtgcgcgacagcactggagcacgtgtcatcttccctgcggctgaggacaaggaccaggacctgatcaccatcattggaaaggaggacgccgtccgagaggcacagaaggagctggaggccttgatccaaaacctggataatgtggtggaagactccatgctggtggaccccaagcaccaccgccacttcgtcatccgcagaggccaggtcttgcgggagattgctgaagagtatggyggggtgatggtcagcttcccacgctctggcacacagagcgacaaagtcaccctcaagggcgccaaggactgtgtggaggcrgccaagaaacgcattcaggagatcattgaggacctggaagctcaggtgacattagaatgtgctataccccagaaattccatcgatctgtcatgggccccaaaggttccagaatccagcagattactcgggatttcagtgttcaaattaaattcccagacagagaggagaacgcagttcacagtacagagccagttgtccaggagaatggggacgaagctggggaggggagagaggctaaagattgtgaccccggctctccaaggaggtgtgacatcatcatcatctctggccggaaagaaaagtgtgaggctgccaaggaagctctggaggcattggttcctgtcaccattgaagtagaggtgccctttgaccttcaccgttacrttattgggcagaaaggaagtgggatccgcaagatgatggatgagtttgaggtgaacatacatgtcccggcacctgagctgcagtctgacatcatcgccatcacgggcctcgctgcaaatttggaccgggccaaggctggactgctggagcgtgtgaaggagctacaggccgagcaggaggaccgggctttaaggagttttaagctgagtgtcactgtagaccccaaataccatcccaagattatcgggagaaagggggcagtaattacccaaatccggttggagcatgacgtgaacatccagtttcctgataaggaygatgggaaccagccccaggaccaaattaccatcacagggtacgaaaagaacacagaagctgccagggatgctatactgagaattgtgggtgaacttgagcagatggtttctgaggacgtcccgctggaccaccgcgttcacgcccgcatcattggtgcccgcggcaaagccattcgcaaaatcatggacgaattcaaggtggacattcgcttcccacagagcggagccccagaccccaactgcgtcactgtgacggggctcccagagaatgtggaggaagccatcgaccacatcctcaatctggaggaggaatacctagctgacgtggtggacagtgaggcgctgcaggtatacatgaaacccccagcacacgaagaggccaaggcaccttccagaggctttgtggtgcgggacgcaccctggaccgccagcagcagtgagaaggctcctgacatgagcagctctgaggaatttcccagctttggggctcaggtggctcccaagaccctcccttkgggccccaaacgataatgatcaaaaagaacagaaccctctccagccagyggctggaccctccgtaaattgttgacgctcttcccccttcccgaggtcccgcagggagcctagcgcctggctgtgtgtgcggccgctcctccaggcctggccgtgcccgctcaggacctgctccactgtttaacactaaaccaaggtcatgagcattcgtgctaagataacagactccagctcctggtccacccggcatgtcagtcagcactctggccttcatcacgagagctccgcagccgtggctaggattccacttcctgtgtcatgacctcaggaaataaacgtccttgactttataaaagccaaacgtttgccctcttcctttcccacctccctcctgccagtttcccttggtccagacagtcctgtttgtggagtgcaatcagcctcctccagctgccagagcgcctcagcacaggtgtcagggtgcaaggaagacctggcaatggacagcaggaggcaggttcctggagctggggggtgacctgagaggcagagggtgacgggttctcaggcagtcctgattttacctgccgtggggtctgaaagcaccaagggtccctgcccctacctccactgccagaccctcagcctgaggtctggtgagtggagcctggaggcaaggtggtaggcaccatctgggtcccctgtggccgtcacagtgtctgctgtgattgagatgcgcacaggttgggggaggtagggccttacgcttgtcctcagtgggggcagtttgccttagatgacagctgggctcttcttcacaccacctgcagcccctccctgcccctgccctagctgctgtgtgttcagttgccttctttctacctcagccggcgtggagtggtctctgtgcagttagtgccaccccacacacccgtctcttgattgagatgtttctggtggttatgggtttcccgtggagctgggggtgggcgccgtgtacctaagctggaggctggcgctctccctcagcacaggtgggtcagtggccagcaggcccatctggagtgggagtgggcacttccaccccgcccacaggccatccggctgtgcaggccagcccctaggagcaggtcccgggtgactggcagttttcayggtctagggccgagacgatggcatggggcctagagcatgaggtagagcagaatgcagaccacgccgctggatgccgagagaccctgctctccgagggaggcatctgtgtcatgctgtgagggctgaggacggggccctagtctctggttttctggtcttaacatccttatctgtgtccgccacggaggtgactgagctgctagygagttgtcctgtcccaggtacttgagttttggaaaagctgactcacgcccatccatctcacagcccttccctggggacagtcgcttccgccttgacacctcactctcagttgaataactcaagcttggtcatcttcagackcgaattcttgagtagacccagacggcttagcccaagtctagttgcagctgcctcggcaagtccccatttgctcaggcagccctgaatgggcctgtttacaggaatggtaaattgggattggaaggaatatagcttccagcttcataggctrgggtgaccacggcttaggaaacagggaaagaaagcaaggcccttttcctgcctttcccgggatctgtctactccacctccacgggggaggccagtggggaagggctgtcacctcttccccatctgcatgaagatgaggcaggggtgaggcgtgcgtgtgcttttcctccttgttggatgtcttccatatcatctgtttccatagctacaatccatcccttggccttaactttggaatttggagattatatgcaaacatgtgtaaaggctcatgaatatggatgacactggaattttataaattctaaaataaaacccgaaaccagatgtagcatgctgggactcattttgtcacgctgccgcctgtgtgttctctttctcgtcaccctggagtggtgactggcatctgtgggtagttcgtctttggtgtgattttctcagcagttctcaacactgtgttcaacrgcccctcgggagccacaytgagggagacccaggtgtggtcatggcaagagggtggctgcctgtccctgtcctctggctgccagacagtcagcagttgccctgcagccctcattgagggtggacaaccgtccttgtggagcagcacctgccactcccttttaggactctgccagcctcagtggcattcctggcaccctggacccggcctgtgagttatgacgagctgagttgggtggtggggggtgcgggcggaggcctcggctggaggaggaggagggaggggc

SEQ ID NO: 241 - DNA, 6112 bp, Homo sapiens
cggcttctcccgcgcggggggcgagtaagccagcggcaggaccagcgggcgggggcccacgaacacatgcctcactcctgtcagcagttccaccttttcatggttgaggagcacatgtggtcgccagcctcccatctccagagtcccctaaggcaagatccccagtggattagaaaggactgaaggacttttacaggctaacagcaagaagaacaaagtaactgcaaaatagacggagaattcttgaagacggtagctcttggtcaccataagcgctgcagagaccccgaggtccacattctgttgtagcaaaagctggcaggctgacagaggcggcctcaggacggaccttctggctactgaccgttttgctgtggttttcccggattgtgtgtaggtgtgagatcaaccatgagttccgttgcagttttgacccaagagagttttgctgaacaccgaagtgggctggttccgcaacaaatcaaagttgccactctaaattcagaagaggagagcgaccctccaacctacaaggatgccttccctccacttcctgagaaagctgcttgcctggaaagtgcccaggaacccgctggagcctgggggaacaagatccgacccatcaaggcttctgtcatcactcaggtgttccatgtacccctggaggagagaaaatacaaggatatgaaccagtttggagaaggtgaacaagcaaaaatctgccttgagatcatgcagagaactggtgctcacttggagctgtctttggccaaagaccaaggcctctccatcatggtgtcaggaaagctggatgctgtcatgaaagctcggaaggacattgttgctagactgcagactcaggcctcagcaactgttgccattcccaaagaacaccatcgctttgttattggcaaaaatggagagaaactgcaagacttggagctaaaaactgcaaccaaaatccagatcccacgcccagatgaccccagcaatcagatcaagatcactggcaccaaagagggcatcgagaaagctcgccatgaagtcttactcatctctgccgagcaggacaaacgtgctgtggagaggctagaagtagaaaaggcattccaccccttcatcgctgggccgtataatagactggttggcgagatcatgcaggagacaggcacgcgcatcaacatccccccacccagcgtgaaccggacagagattgtcttcactggagagaaggaacagttggctcaggctgtggctcgcatcaagaagatttatgaggagaagaaaaagaagactacaaccattgcagtggaagtgaagaaatcccaacacaagtatgtcattgggcccaagggcaattcattgcaggagatccttgagagaactggagtttccgttgagatcccaccctcagacagcatctctgagactgtaatacttcgaggcgaacctgaaaagttaggtcaggcgttgactgaagtctatgccaaggccaatagcttcaccgtctcctctgtcgccgccccttcctggcttcaccgtttcatcattggcaagaaagggcagaacctggccaaaatcactcagcagatgccaaaggttcacatcgagttcacagagggcgaagacaagatcaccctggagggccctacagaggatgtcartgtggcccaggaacagatagaaggcatggtcaaagatttgattaaccggatggactatgtggagatcaacatcgaccacaagttccacaggcacctcattgggaagagcggtgccaacataaacagaatcaaagaycagtacaaggtgtccgtgcgcatccctcctgacagtgagaagagcaatttgatccgcatcgagggggacccacagggcgtgcagcaggccaagcgagagctgctggagcttgcatctcgcatggaaaatgagcgtaccaaggatctaatcattgagcaaagatttcatcgcacaatcattgggcagaagggtgaacggatccgtgaaattcgtgacaaattcccagaggtcatcattaactttccagacccagcacaaaaaagtgacattgtccagctcagaggacctaagaatgaggtggaaaaatgcacaaaatacatgcagaagatggtggcagatctggtggaaaatagctattcaatttctgttccgatcttcaaacagtttcacaagaatatcattgggaaaggaggcgcaaacattaaaaagattcgtgaagaaagcaacaccaaaatcgaccttccagcagagaatagcaattcagagaccattatcatcacaggcaagcgagccaactgcgaagctgcccggagcaggattctgtctattcagaaagacctggccaacatagccgaggtagaggtctccatccctgccaagctgcacaactccctcattggcaccaagggccgtctgatccgctccatcatggaggagtgcggcggggtccacattcactttcccgtggaaggttcaggaagcgacaccgttgttatcaggggcccttcctcggatgtggagaaggccaagaagcagctcctgcatctggcggaggagaagcaaaccaagagtttcactgttgacatccgcgccaagccagaataccacaaattcctcatcggcaaggggggcggcaaaattcgcaaggtgcgcgacagcactggagcacgtgtcatcttccctgcggctgaggacaaggaccaggacctgatcaccatcattggaaaggaggacgccgtccgagaggcacagaaggagctggaggccttgatccaaaacctggataatgtggtggaagactccatgctggtggaccccaagcaccaccgccacttcgtcatccgcagaggccaggtcttgcgggagattgctgaagagtatggyggggtgatggtcagcttcccacgctctggcacacagagcgacaaagtcaccctcaagggcgccaaggactgtgtggaggcrgccaagaaacgcattcaggagatcattgaggacctggaagctcaggtgacattagaatgtgctataccccagaaattccatcgatctgtcatgggccccaaaggttccagaatccagcagattactcgggatttcagtgttcaaattaaattcccagacagagaggagaacgcagttcacagtacagagccagttgtccaggagaatggggacgaagctggggaggggagagaggctaaagattgtgaccccggctctccaaggaggtgtgacatcatcatcatctctggccggaaagaaaagtgtgaggctgccaaggaagctctggaggcattggttcctgtcaccattgaagtagaggtgccctttgaccttcaccgttacrttattgggcagaaaggaagtgggatccgcaagatgatggatgagtttgaggtgaacatacatgtcccggcacctgagctgcagtctgacatcatcgccatcacgggcctcgctgcaaatttggaccgggccaaggctggactgctggagcgtgtgaaggagctacaggccgagcaggaggaccgggctttaaggagttttaagctgagtgtcactgtagaccccaaataccatcccaagattatcgggagaaagggggcagtaattacccaaatccggttggagcatgacgtgaacatccagtttcctgataaggaygatgggaaccagccccaggaccaaattaccatcacagggtacgaaaagaacacagaagctgccagggatgctatactgagaattgtgggtgaacttgagcagatggtttctgaggacgtcccgctggaccaccgcgttcacgcccgcatcattggtgcccgcggcaaagccattcgcaaaatcatggacgaattcaaggtggacattcgcttcccacagagcggagccccagaccccaactgcgtcactgtgacggggctcccagagaatgtggaggaagccatcgaccacatcctcaatctggaggaggaatacctagctgacgtggtggacagtgaggcgctgcaggtatacatgaaacccccagcacacgaagaggccaaggcaccttccagaggctttgtggtgcgggacgcaccctggaccgccagcagcagtgagaaggctcctgacatgagcagctctgaggaatttcccagctttggggctcaggtggctcccaagaccctcccttkgggccccaaacgataatgatcaaaaagaacagaaccctctccagcctgctgrcccraacccaacyacacaatggtttgtctcaatctgacccagyggctggaccctccgtaaattgttgacgctcttcccccttcccgaggtcccgcagggagcctagcgcctggctgtgtgtgcggccgctcctccaggcctggccgtgcccgctcaggacctgctccactgtttaacactaaaccaaggtcatgagcattcgtgctaagataacagactccagctcctggtccacccggcatgtcagtcagcactctggccttcatcacgagagctccgcagccgtggctaggattccacttcctgtgtcatgacctcaggaaataaacgtccttgactttataaaagccaaacgtttgccctcttcctttcccacctccctcctgccagtttcccttggtccagacagtcctgtttgtggagtgcaatcagcctcctccagctgccagagcgcctcagcacaggtgtcagggtgcaaggaagacctggcaatggacagcaggaggcaggttcctggagctggggggtgacctgagaggcagagggtgacgggttctcaggcagtcctgattttacctgccgtggggtctgaaagcaccaagggtccctgcccctacctccactgccagaccctcagcctgaggtctggtgagtggagcctggaggcaaggtggtaggcaccatctgggtcccctgtggccgtcacagtgtctgctgtgattgagatgcgcacaggttgggggaggtagggccttacgcttgtcctcagtgggggcagtttgccttagatgacagctgggctcttcttcacaccacctgcagcccctccctgcccctgccctagctgctgtgtgttcagttgccttctttctacctcagccggcgtggagtggtctctgtgcagttagtgccaccccacacacccgtctcttgattgagatgtttctggtggttatgggtttcccgtggagctgggggtgggcgccgtgtacctaagctggaggctggcgctctccctcagcacaggtgggtcagtggccagcaggcccatctggagtgggagtgggcacttccaccccgcccacaggccatccggctgtgcaggccagcccctaggagcaggtcccgggtgactggcagttttcayggtctagggccgagacgatggcatggggcctagagcatgaggtagagcagaatgcagaccacgccgctggatgccgagagaccctgctctccgagggaggcatctgtgtcatgctgtgagggctgaggacggggccctagtctctggttttctggtcttaacatccttatctgtgtccgccacggaggtgactgagctgctagygagttgtcctgtcccaggtacttgagttttggaaaagctgactcacgcccatccatctcacagcccttccctggggacagtcgcttccgccttgacacctcactctcagttgaataactcaagcttggtcatcttcagackcgaattcttgagtagacccagacggcttagcccaagtctagttgcagctgcctcggcaagtccccatttgctcaggcagccctgaatgggcctgtttacaggaatggtaaattgggattggaaggaatatagcttccagcttcataggctrgggtgaccacggcttaggaaacagggaaagaaagcaaggcccttttcctgcctttcccgggatctgtctactccacctccacgggggaggccagtggggaagggctgtcacctcttccccatctgcatgagttctggaactctgtcctgttggctgcttgcttccagctccccscaatctccatcgcagcrggttcctcctgtcttttctacagt

SEQ ID NO: 242 - DNA, 5879 bp, Homo sapiens
gcctcggagcgtcccggcttctcccgcgcggggggcgagtaagccagcggcaggaccagcgggcgggggcccacgacaaaagctggcaggctgacagaggcggcctcaggacggaccttctggctactgaccgttttgctgtggttttcccggattgtgtgtaggtgtgagatcaaccatgagttccgttgcagttttgacccaagagagttttgctgaacaccgaagtgggctggttccgcaacaaatcaaagttgccactctaaattcagaagaggagagcgaccctccaacctacaaggatgccttccctccacttcctgagaaagctgcttgcctggaaagtgcccaggaacccgctggagcctgggggaacaagatccgacccatcaaggcttctgtcatcactcaggtgttccatgtacccctggaggagagaaaatacaaggatatgaaccagtttggagaaggtgaacaagcaaaaatctgccttgagatcatgcagagaactggtgctcacttggagctgtctttggccaaagaccaaggcctctccatcatggtgtcaggaaagctggatgctgtcatgaaagctcggaaggacattgttgctagactgcagactcaggcctcagcaactgttgccattcccaaagaacaccatcgctttgttattggcaaaaatggagagaaactgcaagacttggagctaaaaactgcaaccaaaatccagatcccacgcccagatgaccccagcaatcagatcaagatcactggcaccaaagagggcatcgagaaagctcgccatgaagtcttactcatctctgccgagcaggacaaacgtgctgtggagaggctagaagtagaaaaggcattccaccccttcatcgctgggccgtataatagactggttggcgagatcatgcaggagacaggcacgcgcatcaacatccccccacccagcgtgaaccggacagagattgtcttcactggagagaaggaacagttggctcaggctgtggctcgcatcaagaagatttatgaggagaagaaaaagaagactacaaccattgcagtggaagtgaagaaatcccaacacaagtatgtcattgggcccaagggcaattcattgcaggagatccttgagagaactggagtttccgttgagatcccaccctcagacagcatctctgagactgtaatacttcgaggcgaacctgaaaagttaggtcaggcgttgactgaagtctatgccaaggccaatagcttcaccgtctcctctgtcgccgccccttcctggcttcaccgtttcatcattggcaagaaagggcagaacctggccaaaatcactcagcagatgccaaaggttcacatcgagttcacagagggcgaagacaagatcaccctggagggccctacagaggatgtcartgtggcccaggaacagatagaaggcatggtcaaagatttgattaaccggatggactatgtggagatcaacatcgaccacaagttccacaggcacctcattgggaagagcggtgccaacataaacagaatcaaagaycagtacaaggtgtccgtgcgcatccctcctgacagtgagaagagcaatttgatccgcatcgagggggacccacagggcgtgcagcaggccaagcgagagctgctggagcttgcatctcgcatggaaaatgagcgtaccaaggatctaatcattgagcaaagatttcatcgcacaatcattgggcagaagggtgaacggatccgtgaaattcgtgacaaattcccagaggtcatcattaactttccagacccagcacaaaaaagtgacattgtccagctcagaggacctaagaatgaggtggaaaaatgcacaaaatacatgcagaagatggtggcagatctggtggaaaatagctattcaatttctgttccgatcttcaaacagtttcacaagaatatcattgggaaaggaggcgcaaacattaaaaagattcgtgaagaaagcaacaccaaaatcgaccttccagcagagaatagcaattcagagaccattatcatcacaggcaagcgagccaactgcgaagctgcccggagcaggattctgtctattcagaaagacctggccaacatagccgaggtagaggtctccatccctgccaagctgcacaactccctcattggcaccaagggccgtctgatccgctccatcatggaggagtgcggcggggtccacattcactttcccgtggaaggttcaggaagcgacaccgttgttatcaggggcccttcctcggatgtggagaaggccaagaagcagctcctgcatctggcggaggagaagcaaaccaagagtttcactgttgacatccgcgccaagccagaataccacaaattcctcatcggcaaggggggcggcaaaattcgcaaggtgcgcgacagcactggagcacgtgtcatcttccctgcggctgaggacaaggaccaggacctgatcaccatcattggaaaggaggacgccgtccgagaggcacagaaggagctggaggccttgatccaaaacctggataatgtggtggaagactccatgctggtggaccccaagcaccaccgccacttcgtcatccgcagaggccaggtcttgcgggagattgctgaagagtatggyggggtgatggtcagcttcccacgctctggcacacagagcgacaaagtcaccctcaagggcgccaaggactgtgtggaggcrgccaagaaacgcattcaggagatcattgaggacctggaagctcaggtgacattagaatgtgctataccccagaaattccatcgatctgtcatgggccccaaaggttccagaatccagcagattactcgggatttcagtgttcaaattaaattcccagacagagaggagaacgcagttcacagtacagagccagttgtccaggagaatggggacgaagctggggaggggagagaggctaaagattgtgaccccggctctccaaggaggtgtgacatcatcatcatctctggccggaaagaaaagtgtgaggctgccaaggaagctctggaggcattggttcctgtcaccattgaagtagaggtgccctttgaccttcaccgttacrttattgggcagaaaggaagtgggatccgcaagatgatggatgagtttgaggtgaacatacatgtcccggcacctgagctgcagtctgacatcatcgccatcacgggcctcgctgcaaatttggaccgggccaaggctggactgctggagcgtgtgaaggagctacaggccgagcaggaggaccgggctttaaggagttttaagctgagtgtcactgtagaccccaaataccatcccaagattatcgggagaaagggggcagtaattacccaaatccggttggagcatgacgtgaacatccagtttcctgataaggaygatgggaaccagccccaggaccaaattaccatcacagggtacgaaaagaacacagaagctgccagggatgctatactgagaattgtgggtgaacttgagcagatggtttctgaggacgtcccgctggaccaccgcgttcacgcccgcatcattggtgcccgcggcaaagccattcgcaaaatcatggacgaattcaaggtggacattcgcttcccacagagcggagccccagaccccaactgcgtcactgtgacggggctcccagagaatgtggaggaagccatcgaccacatcctcaatctggaggaggaatacctagctgacgtggtggacagtgaggcgctgcaggtatacatgaaacccccagcacacgaagaggccaaggcaccttccagaggctttgtggtgcgggacgcaccctggaccgccagcagcagtgagaaggctcctgacatgagcagctctgaggaatttcccagctttggggctcaggtggctcccaagaccctcccttkgggccccaaacgataatgatcaaaaagaacagaaccctctccagcctgctgrcccraacccaacyacacaatggtttgtctcaatctgacccagyggctggaccctccgtaaattgttgacgctcttcccccttcccgaggtcccgcagggagcctagcgcctggctgtgtgtgcggccgctcctccaggcctggccgtgcccgctcaggacctgctccactgtttaacactaaaccaaggtcatgagcattcgtgctaagataacagactccagctcctggtccacccggcatgtcagtcagcactctggccttcatcacgagagctccgcagccgtggctaggattccacttcctgtgtcatgacctcaggaaataaacgtccttgactttataaaagccaaacgtttgccctcttcctttcccacctccctcctgccagtttcccttggtccagacagtcctgtttgtggagtgcaatcagcctcctccagctgccagagcgcctcagcacaggtgtcagggtgcaaggaagacctggcaatggacagcaggaggcaggttcctggagctggggggtgacctgagaggcagagggtgacgggttctcaggcagtcctgattttacctgccgtggggtctgaaagcaccaagggtccctgcccctacctccactgccagaccctcagcctgaggtctggtgagtggagcctggaggcaaggtggtaggcaccatctgggtcccctgtggccgtcacagtgtctgctgtgattgagatgcgcacaggttgggggaggtagggccttacgcttgtcctcagtgggggcagtttgccttagatgacagctgggctcttcttcacaccacctgcagcccctccctgcccctgccctagctgctgtgtgttcagttgccttctttctacctcagccggcgtggagtggtctctgtgcagttagtgccaccccacacacccgtctcttgattgagatgtttctggtggttatgggtttcccgtggagctgggggtgggcgccgtgtacctaagctggaggctggcgctctccctcagcacaggtgggtcagtggccagcaggcccatctggagtgggagtgggcacttccaccccgcccacaggccatccggctgtgcaggccagcccctaggagcaggtcccgggtgactggcagttttcayggtctagggccgagacgatggcatggggcctagagcatgaggtagagcagaatgcagaccacgccgctggatgccgagagaccctgctctccgagggaggcatctgtgtcatgctgtgagggctgaggacggggccctagtctctggttttctggtcttaacatccttatctgtgtccgccacggaggtgactgagctgctagygagttgtcctgtcccaggtacttgagttttggaaaagctgactcacgcccatccatctcacagcccttccctggggacagtcgcttccgccttgacacctcactctcagttgaataactcaagcttggtcatcttcagackcgaattcttgagtagacccagacggcttagcccaagtctagttgcagctgcctcggcaagtccccatttgctcaggcagccctgaatgggcctgtttacaggaatggtaaattgggattggaaggaatatagcttccagcttcataggctrgggtgaccacggcttaggaaacagggaaagaaagcaaggcccttttcctgcctttcccgggatctgtctactccacctccacgggggaggccagtggggaagggctgtcacctcttccccatctgcatgagttctggaactctgtcctgttggctgcttgcttccagctccccscaatctccatcgcagcrggttcctcctgtcttttctacagt

SEQ ID NO: 243 - DNA, 2020 bp, Homo sapiens
atcttagaaggcagggggctcgcaccgagacgctcctagcaagcccctcacgcgagcgaatgactggcgccaggagaaacgcataggacctcccgaagccgccgagagcaaaaggacccatcagagctgtgctgagacccgcygcgggccgggctcgcactcgagattctcgcccgtgggattccagtcctgagctgaacgagagataagtctttgtcaccccccagtctttactgtttcgagaaaccctaagattttttaaaaaaaagcccaaracgtcaagtcggggaactccaacattggggtgtccagaaacactggggtttcaggcgctctgtaaatgcgtccgaggtccgcggttctgcccgcargcccagaccccggcctcacttccgccccgcgccccgcgccccggcctcacgtcccgcccgcggcaggcctgtgggctgcgaggaggagctttgcctagcttgcaggcagcgcagggcagacggcggcaggagaagcaagatgaatgcaggctcagatcctgtggtcatcgtctcggcggcgcggaccatcataggttccttcaatggtgccttagctgctgttcctgtccaggacctgggctccactgtcatcaaagaagtcttgaagagggccactgtggctccggaagatgtgtctgaggtcatctttggacatgtcttggcagcaggctgtgggcagaatcctgttagacaagccagtgtgggtgcaggaattccctactctgttccagcatggagctgccagatgatctgtgggtcaggcctaaaagctgtgtgccttgcagtccagtcaatagggataggagactccagcattgtggttgcaggaggcatggaaaatatgagcaaggctcctcacttggcttacttgagaacaggagtaaagataggtgagatgccactgactgacagtatactctgtgatggtcttacagatgcatttcacaactgtcatatgggtattacagctgaaaatgtagccaaaaaatggcaagtgagtagagaagatcaggacaaggttgcagttctgtcccagaacaggacagagaatgcacagaaagctggccattttgacaaagagattgtaccagttttggtgtcaactagaaraggtcttattgaagttaaaacagatgagtttcctcgccatgggagcaacatagaagccatgtccaagctaaagccttactttcttactgatggaacgggaacagtcaccccagccaatgcttcaggaataaatgatggtgctgcagctgtygttcttatgaagaagtcagaagctgataaacgtggrcttacacctttagcacggatagtttcctggtcccaagtgggtgtggagccttccattatgggaataggaccaattccagccataaagcaagctgttacaaaagcaggttggtcactggaagatgttgacatatttgaaatcaatgaagcctttgcagctgtctctgctgcaatagttaaagaacttggattaaacccagagaaggtcaatattgaaggaggggctatagccttgggccaccctcttggagcatctggctgtcgaattcttgtgaccctgttacacacactggagagaatgggcagaartcgtggtgttgcagccctgtgcattgggggtgggatgggaatagcaatgtgtgttcagagagaatgaattgcttaaactttgaacaacctcaatttctttttaaactaataaagtactaggttgcaatatgtgaaatcagaggaccaaagtacagatggaaaccatttcctacatcacaaaaacccaagtttacagcttgtactttactttaatgtgtaatactcaactcamggtacaagacaattgcatytaacattgttataaataaaaggaacatcagatcaatcawwaagggctccagagtgaacagcatcttcataacttccatgtttatcatctttactttctggatgtaatttaataagatcatcaattcgaagaa

SEQ ID NO: 244 - DNA, 2639 bp, Homo sapiens
atcttagaaggcagggggctcgcaccgagacgctcctagcaagcccctcacgcgagcgaatgactggcgccaggagaaacgcataggacctcccgaagccgccgagagcaaaaggacccatcagagctgtgctgagacccgcygcgggccgggctcgcactcgagattctcgcccgtgggattccagtcctgagctgaacgagagataagtctttgtcaccccccagtctttactgtttcgagaaaccctaagattttttaaaaaaaagcccaaracgtcaagtcggggaactccaacattggggtgtccagaaacactggggtttcaggcgctctgtaaatgcgtccgaggtccgcggttctgcccgcargcccagaccccggcctcacttccgccccgcgccccgcgccccggcctcacgtcccgcccgcggcaggcctgtgggctgcgaggaggagctttgcctagcttgcaggcagcgcagggcagacggcggcaggagaagcaagatgaatgcaggctcagatcctgtggtcatcgtctcggcggcgcggaccatcataggttccttcaatggtgccttagctgctgttcctgtccaggacctgggctccactgtcatcaaagaagtcttgaagagggccactgtggctccggaagatgtgtctgaggtcatctttggacatgtcttggcagcaggctgtgggcagaatcctgttagacaagccagtgtgggtgcaggaattccctactctgttccagcatggagctgccagatgatctgtgggtcaggcctaaaagctgtgtgccttgcagtccagtcaatagggataggagactccagcattgtggttgcaggaggcatggaaaatatgagcaaggctcctcacttggcttacttgagaacaggagtaaagataggtgagatgccactgactgacagtatactctgtgatggtcttacagatgcatttcacaactgtcatatgggtattacagctgaaaatgtagccaaaaaatggcaagtgagtagagaagatcaggacaaggttgcagttctgtcccagaacaggacagagaatgcacagaaagctggccattttgacaaagagattgtaccagttttggtgtcaactagaaraggtcttattgaagttaaaacagatgagtttcctcgccatgggagcaacatagaagccatgtccaagctaaagccttactttcttactgatggaacgggaacagtcaccccagccaatgcttcaggaataaatgatggtgctgcagctgtygttcttatgaagaagtcagaagctgataaacgtggrcttacacctttagcacggatagtttcctggtcccaagtgggtgtggagccttccattatgggaataggaccaattccagccataaagcaagctgttacaaaagcaggttggtcactggaagatgttgacatatttgaaatcaatgaagcctttgcagctgtctctgctgcaatagttaaagaacttggattaaacccagagaaggtcaatattgaaggaggggctatagccttgggccaccctcttggagcatctggctgtcgaattcttgtgaccctgttacacacactggagagaatgggcagaartcgtggtgttgcagccctgtgcattgggggtgggatgggaatagcaatgtgtgttcagagagaatgaattgcttaaactttgaacaacctcaatttctttttaaactaataaagtactaggttgcaatatgtgaaatcagaggaccaaagtacagatggaaaccatttcctacatcacaaaaacccaagtttacagcttgtactttactttaatgtgtaatactcaactcamggtacaagacaattgcatytaacattgttataaataaaaggaacatcagatcaatcawwaagggctccagagtgaacagcatcttcataacttccatgtttatcatctttactttctggcattttagatttttacgttctgggttaacctgggcctcattatgaaaagctcttaattttgcaaccagatctgtggagtcctgggcagcattaactgctagtgtattgggaataacaagaagtgatcttgcaaactctgcaatcgcaagctgttcccgagaccccatgctggttgcatagttttcaaggtatatggaaagggctgcttctacagcacccccaccgggaaccacagattttgactccaaaactctcttcactacacaaagtgcatcatgtaaagagcgctccatctcatcacacatgaaatcatttgccccacgtaagataatcgatgcagacgtacgagccttagtatttttgattaagatcagctcatcatcacaaattctctcctgtaccacttcttctgcctgtcccaacattgcagcttcaaaagtttcttcaccttccaaattggccagggttgacagaatagttgctccagaagctttggcaatgcgtttaaggtccctttttaaaactcttctaactgccatagcaccagcctccacaaaatacttcagacacatatcatcaattccaccagtggttagaataacattggcaccagttgccaggatcttctgaattctctccttggtgatatct

SEQ ID NO: 245 - DNA, 1599 bp, Homo sapiens
gtcccgcccgcggcaggcctgtgggctgcgaggaggagctttgcctagcttgcaggcagcgcagggcagacggcggcaggagaagcaagatgaatgcaggctcagatcctgtggtcatcgtctcggcggcgcggaccatcataggttccttcaatggtgccttagctgctgttcctgtccaggacctgggctccactgtcatcaaagaagtcttgaagagggccactgtggctccggaagatgtgtctgaggtcatctttggacatgtcttggcagcaggctgtgggcagaatcctgttagacaagccagtgtgggtgcaggaattccctactctgttccagcatggagctgccagatgatctgtgggtcaggcctaaaagctgtgtgccttgcagtccagtcaatagggataggagactccagcattgtggttgcaggaggcatggaaaatatgagcaaggctcctcacttggcttacttgagaacaggagtaaagataggtgagatgccactgactgacagtatactctgtgatggtcttacagatgcatttcacaactgtcatatgggtattacagctgaaaatgtagccaaaaaatggcaagtgagtagagaagatcaggacaaggttgcagttctgtcccagaacaggacagagaatgcacagaaagctggccattttgacaaagagattgtaccagttttggtgtcaactagaaraggtcttattgaagttaaaacagatgagtttcctcgccatgggagcaacatagaagccatgtccaagctaaagccttactttcttactgatggaacgggaacagtcaccccagccaatgcttcaggaataaatgatggtgctgcagctgtygttcttatgaagaagtcagaagctgataaacgtggrcttacacctttagcacggatagtttcctggtcccaagtgggtgtggagccttccattatgggaataggaccaattccagccataaagcaagctgttacaaaagcaggttggtcactggaagatgttgacatatttgaaatcaatgaagcctttgcagctgtctctgctgcaatagttaaagaacttggattaaacccagagaaggtcaatattgaaggaggggctatagccttgggccaccctcttggagcatctggctgtcgaattcttgtgaccctgttacacacactggagagaatgggcagaartcgtggtgttgcagccctgtgcattgggggtgggatgggaatagcaatgtgtgttcagagagaatgaattgcttaaactttgaacaacctcaatttctttttaaactaataaagtactaggttgcaatatgtgaaatcagaggaccaaagtacagatggaaaccatttcctacatcacaaaaacccaagtttacagcttgtactttactttaatgtgtaatactcaactcamggtacaagacaattgcatytaacattgttataaataaaaggaacatcagatcaatcawwaagggctccagagtgaacagcatcttcataacttccatgtttatcatctttactttctggatgtaatttaataagatcatcaattcgaagaa

SEQ ID NO: 246 - DNA, 4663 bp, Homo sapiens
  misc_feature (1)...(4663): n = A,T,C or G, or insertion/deletion polymorphism (see Tables 1-2)
cctgctcctgctcctccgctcctcctgcgcggggtgctgaaacagcccggggaagtagagccgcctccggggagcccaaccagccgaacgccgccggcgtcmgcagccttgcgcggccacagcatgaccgctcgcggcctggcccttggcctcctcctgctgctactgtgtccagcgcaggtgttttcacagtcctgtgtttggtatggagagtgtggaattgcatatggggacaagaggtacaattgcgaatattctggcccaccaaaaccattgccaaaggatggatatgacttagtgcaggaactctgtccaggattcttctttggcaatgtcagtctctgttgtgatgttcggcagcttcagacactaaaagacaacctgcagctgcctctacrgtttctgtccagatgtccatcctgtttttataacctactgaacctgttttgtgagctgacaygtagccctygacagagtcagtttttgaatgttacagctactgaagattaygttgatcctgttacaaaccagacgaaaacaaatgtgaaagagttacaatactacgtcggacagagttttgccaatgcaatgtacaatgcctgccgggatgtggaggccccctcaagtaatgacaaggccctgggactcctgkrtgggaaggacgctgacgcctgtaatgccaccaactggattgaatacatgttcaataaggacaatggacaggcaccttttaccatcactcctgtgttttmagattttccagtccrtgggatggagcccatgaacaatgccaccaaaggctgtgacgagtctgkggatgaggtcacagcaycatgtagctgccaasactgctctattgtctgtggccccaagccccagcccccacctcctcctgctccctggacgatccttggcttggacgccatgtatgtcatcakgtggatcacctacatggcgtttttgcttgtgttttttggagcattttttgcagtgtggtgctacagaaaacggtattttgtctccgagtacactcccatcgatagcaatatagctttttctgttaatgcaagtgacaaaggagaggcgtcytgctgtgaccctgtcagcgcagcatttgagggctgcttgaggcggctgttcacacgctgggggtctttctgcgtccgaaaccctggctgtgtcattttcttctcrctggtcttcattactgcgtgttcgtcaggcctggtgtttgtccgggtcacaaccaatccagytgacctctggtcagcccccagcagccaggctcgcctggaaaaagagtactttgaccagcactttgggcctttcttccrgacggagcagctcatcatccgggcccctctcactgacaaacacatttaccagccatacccttcgggagctgatgtaccctttggacctycgcttgacatacagatactgcaccaggttcttgacttacaaatagccatcgaaaacattactgcctcttatgacaatgagactgtgacacttcaagacatctgcttggcccctcttycaccgtataacacgaactgcaccattttgagtgtgttaaattacttccagaacagccattccgtgctggaccacaagaaaggggacgacttctttgtgtatgccgattaccacacgcrctttctgtactgcgtaygggctcctgcctctctgaatgatacaagtttgctccatgacccttgtctgggtacgtttggtggaccagtgttcccgtggcttgtgttgggaggctatgatgatcaaaactacaataacgccactgcccttgtgattaccttccctgtcaataattactataatgatacagagaagctccagagggcccaggcctgggaaaaagagtttattaattttgtgaaaaactacaagaatcccaatctgaccatttccttcactgytgaaygaagtattgaagatgaactaaatcgtgaaagtgacagtgatgtcttcaccgttgtaattagctatgccatcakgtttctatatatttccctagccttggggcacatsaaaagctgtcgcaggcttctggtggattcgaaggtctcactaggcatcgcgggcatcttgatcgtgctgagctcggtggcttgstccttgggtgtcttcagctacattgggttgcccttgaccctcattgtgattgaagtcatcccgttcctggtgctggctgttggagtggacaacatctycattctggtgcaggcctaccagagagatgaacgtcttcaaggggaaaccctggatcagcagcygggcagggtcctaggagaagtggctcccagtatgttcctgtcatccttttctgagactgtagcatttttyttaggagcattgtccgtgatgccagccgtgcacaccttctctctctttgcgggattggcagtcttcattgactttcttctgcmgattacctgtttcgtgagtctcttggggttagacattaaacgtcaagagaaaaatcggctagacatcttttgctgtgtcagaggtgctgaagatggaacaagcgtccaggcctsagagagctgtttgtttcgcttcttcaaaaactcctrttctccacttctgctaaaggactggatgagaccaattgtgatagcaatatttgtgggtgttctgtcattcagcatcgcagtcctgaacaaagtagatrttggattggatcagtctctttcgatgccagatgactcctacatggtggwttatttcaaatccatcagtcagtacctgcatgcgggtccrcctrtgtactttgtcctggaggaagggcacgactacacttcttccaaggggcagaacatggtgtgcggcrgcatgggctgcaacaatgattccctggtgcagcagatatttaacgcggcgcmgctggacaaytatacccraataggcttcgccccctcgtcctggatcgacgattatttcractggrtgaagccacagtygtcttrctgtcgagtggacartatcactgaccagttctgcaatgcttcagtggttgaccctgcctgcgttygctgcaggcctctgactccggaargcaaacagaggcctcagnggggagacttcakgagattcctgcccatgttcctttcggataaccctaaccccaagtgtggcaaagggggacatgctgcctatagttctgcagttaacatcctccttggccatggcaccagggtcggagycaygtacttcatgacctaccacaccgtgctgcagacctctgctgactttattgacrctctgaagaaagcccgacttayagccagtaatgtcaccgaaaccatgggcattaacggcagtgcctaccgagtatttccttacagtgtgttttatgtcttctrcgaacagtacctgaccatcattgacgacactatcttcaacctcggtgtgtccctgggcgcgatatttctggtgaccatgktcctcctgggctgtgagctctggtctgcagtcatcatgtgtgccaccatcgccatggtcttggtcaacatgtttggagttaygtrgctctggggcatcagtctgaaygctgtatccttggtcarcctggtgatgagctgtggcatctccgtggagttctgcagccacataaccagagcgttcacggtgagcrtgaaaggcagccgcgtggagcgcgcggaagaggcacttgcccacatgggcagctccgtgttcrgtggaatcacacttasaaaatttggagggattgtggtgktsgcttttgccaaatctcaaattttccagatattctacttcaggatgtatttggccatggtcttactggragccactcayggattaatatttctycctgtcttactcagttacatagggccatcagtaaataaagccaaaagttgtgccactgaagagcratacaaaggaacagagcgcgaacggcttctaaatttctagccctctcgcagggcatcctgactgaactgtgtctaagggtcggtcggtttaccactggacgggtgctgcatcggcaaggccaagttgaacaccggatggtgccaaccatcggttgtttggcagcagctttgaacgtagcgcctgtgaactcaggaatgcacagttgacttgggaagcagtattactagatctggaggcaaccacaggacactaaacttctcccagcctcttcaggaaagaaacctcattctttggcaagcaggaggtgacactagatggctgtgaatgtgatccgctcactgacactctgtaaaggccaatcaatgcactgtctgtctctccttttaggagtaagccatcccacaagttctataccatatttttagtgacagttgaggttgtagatacactttataacattttatagtttaaagagctttattaatgcaataaattaactttgtacacatttttatataaaaaaacagcaagtgatttcagaatgttgtaggcctcattagagcttggtctccaaaaatctgtttgaaaaaagcaacatgttcttcacagtgttcccctagaaaggaagagatttaattgccagttagatgtggcatgaaatgagggacaaagaaagcatctcgtaggtgtgtctactgggttttaacttatttttctttaataaaatacattgttttcctaa

SEQ ID NO: 247 - DNA, 4704 bp, Homo sapiens
cagtgttttccttggtctggggctccccacagttccccaccatcactcctcccattccttccaactttatttttagctgccattgggagggggcaggatgggagggaaagtgaagaaaacagaaaaggagagggacagaggccagaggacttctcatactggacagaaaccgatcaggcatggaactccccttcgtcactcacctgttcttgcccctggtgttcctgacaggtctctgctccccctttaacctggatgaacatcacccacgcctattcccagggccaccagaagctgaatttggatacagtgtcttacaacatgttgggggtggacagcgatggatgctggtgggcgccccctgggatgggccttcaggcgaccggaggggggacgtttatcgctgccctgtagggggggcccacaatgccccatgtgccaagggccacttaggtgactaccaactgggaaattcatctcatcctgctgtgaatatgcacctggggatgtctctgttagagacagatggtgatgggggattcatggcctgtgcccctctctggtctcgtgcttgtggcagctctgtcttcagttctgggatatgtgcccgtgtggatgcttcattccagcctcagggaagcctggcacccactgcccaacgctgcccaacatacatggatgttgtcattgtcttggatggctccaacagcatctacccctggtctgaagttcagaccttcctacgaagactggtagggaaactgtttattgacccagaacagatacaggtgggactggtacagtatggggagagccctgtacatgagtggtccctgggagatttccgaacgaaggaagaagtggtgagagcagcaaagaacctcagtcggcgggagggacgagaaacaaagactgcccaagcaataatggtggcctgcacagaagggttcagtcagtcccatgggggccgacccgaggctgccaggctactggtggttgtcactgatggagagtcccatgatggagaggagcttcctgcagcactaaaggcctgtgaggctggaagagtgacacgctatgggattgcagtccttggtcactacctccggcggcagcgagatcccagctctttcctgagagaaattagaactattgccagtgatccagatgagcgattcttyttcaatgtcacagatgaggctgctctgactgacattgtggatgcactaggagatcggatttttggccttgaagggtcccatgcagaaaacgaaagctcctttgggctggaaatgtctcagattggtttctccactcatcrgctaaaggatgggattctttttgggatggtgggggcctatgactggggaggctctgtgctatggcttgaaggaggccaccgccttttccccccacgaatggcactggaagacgagttcccccctgcaytgcagaaccatgcagcctacctgggttactctgtttcttccatgcttttgcggggtggacgccgcctgtttctctctggggctcctcgatttagacatcgaggaaaagtcatcgccttccagcttaagaaagatggggctgtgagggttgcccagagcctccagggggagcagattggttcatactttggcagtgagctctgcccattggatacagatagggatggaacaactgatgtcttacttgtggctgcccccatgttcctgggaccccagaacaaggaaacaggacgtgtttatgtgtatctggtaggccagcagtccttgctgaccctccaaggaacacttcagccagaacccccccaggatgctcggtttggctttgccatgggagctcttcctgatctgaaccaagatggttttgctgatgtggctgtgggggcgcctctggaagatgggcaccagggagcactgtacctgtaccatggaacccagagtggagtcaggccccatcctgcccagaggattgctgctgcctccatgccacatgccctcagctactttggccgaagtgtggatggtcggctagatctggatggagatgatctggtcgatgtggctgtgggtgcccagggggcagccatcctgctcagctcccggcccattgtccatctgaccccatcactggaggtgaccccacaggccatcagtgtggttcagagggactgtaggyggcgaggccaagaggcagtctgtctgactgcagccctttgcttccaagtgacctcccgtactcctggtcrctgggatcaccaattctacatgaggttcaccrcatcactggatgaatggactgctggggcacgtgcagcatttgatggctctggccagaggttgtcccctcrgaggctccggctcagtgtggggaatgtcacttgtgagcagctacacttccatgtgctggatacatcagattacctccggccagtggccttgactgtgacctttgccttggacaatactacaaagccagggcctgtgctgaatgagggctcacccacctctatacaaaagctggtccccttctcaaaggattgtggccctgacaatgaatgtgtcacagacctggtgcttcaagtgaatatggacatcagaggctccaggaaggccccatttgtggttcgaggtggccggcggaaagtgctggtatctacaactctggagaacagaaaggaaaatgcttacaatacgagcctgagtctcatcttctctagaaacctccacctggccagtctcactcctcagagagagagcccaataaaggtggaatgtgccgccccttctgctcatgcccggctctgcagtgtggggcatcctgtcttccagactggagccaaggtgacctttctgctagagtttgagtttagctgctcctctctcctgagccaggtcttcgtgaagctgactgccagcagtgacagcctggagagaaatgggacccttcaagataacacagcccagacctcagcctacatccaatatgagccccacctcctgttctctagtgagtctaccctgcaccgctatgaggttcacccatatgggaccctcccagtgggtcctggcccagaattcaaaaccactctcagggttcagaacctaggctgctatgtggtcagtggcctcatcatctcagccctccttccagctgtggcccatgggggcaattacttcctatcactgtctcaagtcatcactaacaatgcaagctgcatagtgcagaacctgactgaacccccaggcccacctgtgcatccagaggagcttcaacacacaaacagactgaatgggagcaatactcagtgtcaggtggtgaggtgccaccttgggcagctggcaaaggggactgaggtctctgttggactattgaggctggttcacaatgaatttttccgaagagccaagttcaagtccctgayggtggtcagcacctttgagctgggaacygaagagggcagtgtcctacagctgactgaagcctcccgttggagtgagagcctcttggaggtggttcagacccggcctatcctcatctccctgtggatcctcataggcagtgtcctgggagggttgctcctgcttgctctccttgtcttctgcctgtggaagcttggcttctttgcccataagaaaatccctgaggaagaaaaaagagaagagaagttggagcaatgaatrtagaataagggtctagaaagtcctccctggcagcttcttcaagagacttgcataaaagcagaggtttgggggctcagatgggacaagaagccgcctctggactatctccccagaccagcagcctgacttgacttttgagtcctagggatgctgctggctagagatgaggctttacctcagacaagaagagctggcaccaaaactagccatgctcccaccctctgcttccctcctcctcgtgatcctggttccatagccaacactggggcttttgtttggggtccttttatccccaggaatcaataatttttttgcctaggtgcctgactcctttcagattccctctttatcttccctcacagtttggaaaggatgagggttatcttcctcgattcttccaccctctcactttcctgcctgttccccactccacaggagggagctgacgttggcttgaaaggagtaaagtcaacatctgctgctttcctgtggactctggtgattcatagagccggatggggagagtcaacaggaaaaaaggagggaggaggaaaagccacaagagacattctgtacaattccaaggaacagagaagcctttagacaggcaactgccatcccccctgaaacctgagacctgtagtgcactcgaccgccctcaggtgttggtgaaacagagctgcccccaggctcgctgggcataggcttcctgattccaagccttttctgggagcaaagccagggcctggtgcctgattttctgaagccaggagccctcaggtggctggagctggaatagcagggaggactgggtgtacctaggcagtattttctctacttctctcaagtcttatactcactcttgagccctccttggggcctgcttagaaagcagacaggagagagagtactgctacttgatgatgggaaatgctttcactttaccagctttgggaagcagcagccccatgggatctaaaagtgtggagtctgcattaagaaacctacatgggtggca

SEQ ID NO: 248 - DNA, 4502 bp, Homo sapiens
cagtgttttccttggtctggggctccccacagttccccaccatcactcctcccattccttccaactttatttttagctgccattgggagggggcaggatgggagggaaagtgaagaaaacagaaaaggagagggacagaggccagaggacttctcatactggacagaaaccgatcaggcatggaactccccttcgtcactcacctgttcttgcccctggtgttcctgacaggtctctgctccccctttaacctggatgaacatcacccacgcctattcccagggccaccagaagctgaatttggatacagtgtcttacaacatgttgggggtggacagcgatggatgctggtgggcgccccctgggatgggccttcaggcgaccggaggggggacgtttatcgctgccctgtagggggggcccacaatgccccatgtgccaagggccacttaggtgactaccaactgggaaattcatctcatcctgctgtgaatatgcacctggggatgtctctgttagagacagatggtgatgggggattcatggcctgtgcccctctctggtctcgtgcttgtggcagctctgtcttcagttctgggatatgtgcccgtgtggatgcttcattccagcctcagggaagcctggcacccactgcccaacgctgcccaacatacatggatgttgtcattgtcttggatggctccaacagcatctacccctggtctgaagttcagaccttcctacgaagactggtagggaaactgtttattgacccagaacagatacaggtgggactggtacagtatggggagagccctgtacatgagtggtccctgggagatttccgaacgaaggaagaagtggtgagagcagcaaagaacctcagtcggcgggagggacgagaaacaaagactgcccaagcaataatggtggcctgcacagaagggttcagtcagtcccatgggggccgacccgaggctgccaggctactggtggttgtcactgatggagagtcccatgatggagaggagcttcctgcagcactaaaggcctgtgaggctggaagagtgacacgctatgggattgcagtccttggtcactacctccggcggcagcgagatcccagctctttcctgagagaaattagaactattgccagtgatccagatgagcgattcttyttcaatgtcacagatgaggctgctctgactgacattgtggatgcactaggagatcggatttttggccttgaagggtcccatgcagaaaacgaaagctcctttgggctggaaatgtctcagattggtttctccactcatcrgctaaaggatgggattctttttgggatggtgggggcctatgactggggaggctctgtgctatggcttgaaggaggccaccgccttttccccccacgaatggcactggaagacgagttcccccctgcaytgcagaaccatgcagcctacctgggttactctgtttcttccatgcttttgcggggtggacgccgcctgtttctctctggggctcctcgatttagacatcgaggaaaagtcatcgccttccagcttaagaaagatggggctgtgagggttgcccagagcctccagggggagcagattggttcatactttggcagtgagctctgcccattggatacagatagggatggaacaactgatgtcttacttgtggctgcccccatgttcctgggaccccagaacaaggaaacaggacgtgtttatgtgtatctggtaggccagcagtccttgctgaccctccaaggaacacttcagccagaacccccccaggatgctcggtttggctttgccatgggagctcttcctgatctgaaccaagatggttttgctgatgtggctgtgggggcgcctctggaagatgggcaccagggagcactgtacctgtaccatggaacccagagtggagtcaggccccatcctgcccagaggattgctgctgcctccatgccacatgccctcagctactttggccgaagtgtggatggtcggctagatctggatggagatgatctggtcgatgtggctgtgggtgcccagggggcagccatcctgctcagctcccggcccattgtccatctgaccccatcactggaggtgaccccacaggccatcagtgtggttcagagggactgtaggyggcgaggccaagaggcagtctgtctgactgcagccctttgcttccaagtgacctcccgtactcctggtcrctgggatcaccaattctacatgaggttcaccrcatcactggatgaatggactgctggggcacgtgcagcatttgatggctctggccagaggttgtcccctcrgaggctccggctcagtgtggggaatgtcacttgtgagcagctacacttccatgtgctggatacatcagattacctccggccagtggccttgactgtgacctttgccttggacaatactacaaagccagggcctgtgctgaatgagggctcacccacctctatacaaaagctggtccccttctcaaaggattgtggccctgacaatgaatgtgtcacagacctggtgcttcaagtgaatatggacatcagaggctccaggaaggccccatttgtggttcgaggtggccggcggaaagtgctggtatctacaactctggagaacagaaaggaaaatgcttacaatacgagcctgagtctcatcttctctagaaacctccacctggccagtctcactcctcagagagagagcccaataaaggtggaatgtgccgccccttctgctcatgcccggctctgcagtgtggggcatcctgtcttccagactggagccaaggtgacctttctgctagagtttgagtttagctgctcctctctcctgagccaggtcttcgtgaagctgactgccagcagtgacagcctggagagaaatgggacccttcaagataacacagcccagacctcagcctacatccaatatgagccccacctcctgttctctagtgagtctaccctgcaccgctatgaggttcacccatatgggaccctcccagtgggtcctggcccagaattcaaaaccactctcagggttcagaacctaggctgctatgtggtcagtggcctcatcatctcagccctccttccagctgtggcccatgggggcaattacttcctatcactgtctcaagtcatcactaacaatgcaagctgcatagtgcagaacctgactgaacccccaggcccacctgtgcatccagaggagcttcaacacacaaacagactgaatgggagcaatactcagtgtcaggtggtgaggtgccaccttgggcagctggcaaaggggactgaggtctctgttggactattgaggctggttcacaatgaatttttccgaagagccaagttcaagtccctgayggtggtcagcacctttgagctgggaacygaagagggcagtgtcctacagctgactgaagcctcccgttggagtgagagcctcttggaggtggttcagacccggcctatcctcatctccctgtggatcctcataggcagtgtcctgggagggttgctcctgcttgctctccttgtcttctgcctgtggaagcttggcttctttgcccataagaaaatccctgaggaagaaaaaagagaagagaagttggagcaaccaggagccctcaggtggctggagctggaatagcagggaggactgggtgtacctaggcagtattttctctacttctctcaagtcttatactcactcttgagccctccttggggcctgcttagaaagcagacaggagagagagtactgctacttgatgatgggaaatgctttcactttaccagctttgggaagcagcagccccatgggatctaaaagtgtggagtctgcattaagaaacctacatgggtggcatggggctctggggagcaagcccttacttgctcagcactggttatgtagcacaaatagctcctaggaaaatgtttctggggcaaccctagaaccctggtcatattttgcagggtttctctggtggaatcagtttgccagcccttgcttgatgcttactggaaatctccaggttaatttctatctctgatccctccccaacccactccatatttgggtcatggacagtaaaggcagttggattctcayagacaactgggtaacttatatttctttgtaatcaagacttgagatatcgaagtcagttattggtctccagagtgcagctctgggagccttttgaagaatcagcactcattaagagctgagaagagagaagacctgattgggtggttgactagcagtcacagaacctgtcctcccaggctgttcctgaggcctgaccacagtatttattttggcatgtctctggccttctgcagaggcccaccctcatgggcattgtctctgtttcccagtggggtggacagtatatcagatggtcagaacaaataaagttcagtgtcaaatgac

SEQ ID NO: 249 - DNA, 1954 bp, Homo sapiens
gtgactaataacacaataacattgtctggggctggaataaagtcggagctgtttacccccactctaataggggttcaatataaaaagccggcagagagctgtccaagtcagacgcgcctctgcatctgcgccaggcgaacgggtcctgcgcctcctgcagtcccagctctccaccgccgcgtgcgcctgcagacgctccgctcgctgccttctctcctggcaggcgctgccttttctccccgttaaaagggcacttgggctgaaggatcgctttgagatctgaggaacccgcagcgctttgagggacctgaagctgtttttcttcgttttcctttgggttcagtttgaacgggaggtttttgatccctttttttcagaatggattatttgctcatgattttctctctgctgtttgtggcttgccaaggagctccagaaacagcagtcttaggcgctgagctcagcgcggtgggtgagaacggcggggagaaacccactcccagtccaccctggcggctccgccggtccaagcgctgctcctgctcgtccctgatggataaagagtgtgtctacttctgccacctggacatcatttgggtcaacactcccgaggctgaagacattatggagaaagactggaataatcataagaaaggaaaagactgttccaagcttgggaaaaagtgtatttatcagcagttagtgagaggaagaaaaatcagaagaagttcagaggaacacctaagacaaaccaggtcggagaccatgagaaacagcgtcaaatcatcttttcatgatcccaagctgaaaggcaakccctccagagagcgttatgtgacccacaaccgagcacattggtgacagaccttcggggcctgtctgaagccatagcctccacggagagccctgtggccgactctgcactctccaccctggctgggatcagagcaggagcatcctctgctggttcctgactggcaaaggaccagcgtcctcgttcaaaacattccaagaaaggttaaggagttcccccaaccatcttcactggcttccatcagtggtaactgctttggtctcttctttcatctggggatgacaatggacctctcagcagaaacacacagtcacattcgaattcgggtggcatcctccggagagagagagaggaaggagattccacacaggggtggagtttctgacgaaggtcctaagggagtgtttgtgtctgactcaggcgcctggcacatttcagggagaaactccaaagtccacacaaagattttctaaggaatgcacaaattgaaaacacactcaaaagacaaacakgcaagtaaagaaaaaaaaaagaaagacttttgtttaaatttgtaaaatgcaaaactgaatgaaactgttactaccataaatcaggatatgtttcatgaatatgagtctacctcacctatattgcactctggcagaagtatttcccacatttaattattgcctccccaaactcttcccacccctgctgccccttcctccatcccccatactaaatcctagcctcgtagaagtctggtctaatgtgtcagcagtagatataatattttcatggtaatctactagctctgatccataagaaaaaaaagatcattaaatcaggagattccctgtccttgatttttggagacacaatggtatagggttgtttatgaaatatattgaaaagtaagtgtttgttaygctttaaagcagtaaaattattttcctttatataaccggctaatgaaagaggttggattgaattttgatgtacttatttttttatagatatttatattcaaacaatttattccttatatttaccatgttaaatatctgtttgggcaggccatattggtctatgtatttttaaaatatgtatttctaaatgaaattgagaacatgctttgttttgcctgtcaaggtaatg

SEQ ID NO: 250 - DNA, 2110 bp, Homo sapiens
gtgactaataacacaataacattgtctggggctggaataaagtcggagctgtttacccccactctaataggggttcaatataaaaagccggcagagagctgtccaagtcagacgcgcctctgcatctgcgccaggcgaacgggtcctgcgcctcctgcagtcccagctctccaccgccgcgtgcgcctgcagacgctccgctcgctgccttctctcctggcaggcgctgccttttctccccgttaaaagggcacttgggctgaaggatcgctttgagatctgaggaacccgcagcgctttgagggacctgaagctgtttttcttcgttttcctttgggttcagtttgaacgggaggtttttgatccctttttttcagaatggattatttgctcatgattttctctctgctgtttgtggcttgccaaggagctccagaaacagcagtcttaggcgctgagctcagcgcggtgggtgagaacggcggggagaaacccactcccagtccaccctggcggctccgccggtccaagcgctgctcctgctcgtccctgatggataaagagtgtgtctacttctgccacctggacatcatttgggtcaacactcccgagcacgttgttccgtatggacttggaagccctaggtccaagagagccttggagaatttacttcccacaaaggcaacagaccgtgaraatagatgccaatgtgctagccaaaaagacaagaagtgctggaatttttgccaagcaggaaaagaactcagggctgaagacattatggagaaagactggaataatcataagaaaggaaaagactgttccaagcttgggaaaaagtgtatttatcagcagttagtgagaggaagaaaaatcagaagaagttcagaggaacacctaagacaaaccaggtcggagaccatgagaaacagcgtcaaatcatcttttcatgatcccaagctgaaaggcaakccctccagagagcgttatgtgacccacaaccgagcacattggtgacagaccttcggggcctgtctgaagccatagcctccacggagagccctgtggccgactctgcactctccaccctggctgggatcagagcaggagcatcctctgctggttcctgactggcaaaggaccagcgtcctcgttcaaaacattccaagaaaggttaaggagttcccccaaccatcttcactggcttccatcagtggtaactgctttggtctcttctttcatctggggatgacaatggacctctcagcagaaacacacagtcacattcgaattcgggtggcatcctccggagagagagagaggaaggagattccacacaggggtggagtttctgacgaaggtcctaagggagtgtttgtgtctgactcaggcgcctggcacatttcagggagaaactccaaagtccacacaaagattttctaaggaatgcacaaattgaaaacacactcaaaagacaaacakgcaagtaaagaaaaaaaaaagaaagacttttgtttaaatttgtaaaatgcaaaactgaatgaaactgttactaccataaatcaggatatgtttcatgaatatgagtctacctcacctatattgcactctggcagaagtatttcccacatttaattattgcctccccaaactcttcccacccctgctgccccttcctccatcccccatactaaatcctagcctcgtagaagtctggtctaatgtgtcagcagtagatataatattttcatggtaatctactagctctgatccataagaaaaaaaagatcattaaatcaggagattccctgtccttgatttttggagacacaatggtatagggttgtttatgaaatatattgaaaagtaagtgtttgttaygctttaaagcagtaaaattattttcctttatataaccggctaatgaaagaggttggattgaattttgatgtacttatttttttatagatatttatattcaaacaatttattccttatatttaccatgttaaatatctgtttgggcaggccatattggtctatgtatttttaaaatatgtatttctaaatgaaattgagaacatgctttgttttgcctgtcaaggtaatg

SEQ ID NO: 251 - DNA, 1234 bp, Homo sapiens
gtgactaataacacaataacattgtctggggctggaataaagtcggagctgtttacccccactctaataggggttcaatataaaaagccggcagagagctgtccaagtcagacgcgcctctgcatctgcgccaggcgaacgggtcctgcgcctcctgcagtcccagctctccaccgccgcgtgcgcctgcagacgctccgctcgctgccttctctcctggcaggcgctgccttttctccccgttaaaagggcacttgggctgaaggatcgctttgagatctgaggaacccgcagcgctttgagggacctgaagctgtttttcttcgttttcctttgggttcagtttgaacgggaggtttttgatccctttttttcagaatggattatttgctcatgattttctctctgctgtttgtggcttgccaaggagctccagaaacagcagtcttaggcgctgagctcagcgcggtgggtgagaacggcggggagaaacccactcccagtccaccctggcggctccgccggtccaagcgctgctcctgctcgtccctgatggataaagagtgtgtctacttctgccacctggacatcatttgggtcaacactcccgagcacgttgttccgtatggacttggaagccctaggtccaagagagccttggagaatttacttcccacaaaggcaacagaccgtgaraatagatgccaatgtgctagccaaaaagacaagaagtgctggaatttttgccaagcaggaaaagaactcagggctgaagacattatggagaaagactggaataatcataagaaaggaaaagactgttccaagcttgggaaaaagtgtatttatcagcagttagtgagaggaagaaaaatcagaagaagttcagaggaacacctaagacaaaccaggtcggagaccatgagaaacagcgtcaaatcatcttttcatgatcccaagctgaaaggcaakccctccagagagcgttatgtgacccacaaccgagcacattggtgacagaccttcggggcctgtctgaagccatagcctccacggagagccctgtggccgactctgcactctccaccctggctgggatcagagcaggagcatcctctgctggttcctgactggcaaaggaccagcgtcctcgttcaaaactccaaagtccacacaaagattttctaaggaatgcacaaattgaaaacacactcaaaagacaaacakgcaagta

SEQ ID NO: 252 - DNA, 1582 bp, Homo sapiens
aggggttcaatataaaaagccggcagagagctgtccaagtcagacgcgcctctgcatctgcgccaggcgaacgggtcctgcgcctcctgcagtcccagctctccaccgccgcgtgcgcctgcagacgctccgctcgctgccttctctcctggcaggcgctgccttttctccccgttaaaagggcacttgggctgaaggatcgctttgagatctgaggaacccgcagcgctttgagggacctgaagctacattatggagaaagactggaataatcataagaaaggaaaagactgttccaagcttgggaaaaagtgtatttatcagcagttagtgagaggaagaaaaatcagaagaagttcagaggaacacctaagacaaaccaggtcggagaccatgagaaacagcgtcaaatcatcttttcatgatcccaagctgaaaggcaakccctccagagagcgttatgtgacccacaaccgagcacattggtgacagaccttcggggcctgtctgaagccatagcctccacggagagccctgtggccgactctgcactctccaccctggctgggatcagagcaggagcatcctctgctggttcctgactggcaaaggaccagcgtcctcgttcaaaacattccaagaaaggttaaggagttcccccaaccatcttcactggcttccatcagtggtaactgctttggtctcttctttcatctggggatgacaatggacctctcagcagaaacacacagtcacattcgaattcgggtggcatcctccggagagagagagaggaaggagattccacacaggggtggagtttctgacgaaggtcctaagggagtgtttgtgtctgactcaggcgcctggcacatttcagggagaaactccaaagtccacacaaagattttctaaggaatgcacaaattgaaaacacactcaaaagacaaacakgcaagtaaagaaaaaaaaaagaaagacttttgtttaaatttgtaaaatgcaaaactgaatgaaactgttactaccataaatcaggatatgtttcatgaatatgagtctacctcacctatattgcactctggcagaagtatttcccacatttaattattgcctccccaaactcttcccacccctgctgccccttcctccatcccccatactaaatcctagcctcgtagaagtctggtctaatgtgtcagcagtagatataatattttcatggtaatctactagctctgatccataagaaaaaaaagatcattaaatcaggagattccctgtccttgatttttggagacacaatggtatagggttgtttatgaaatatattgaaaagtaagtgtttgttaygctttaaagcagtaaaattattttcctttatataaccggctaatgaaagaggttggattgaattttgatgtacttatttttttatagatatttatattcaaacaatttattccttatatttaccatgttaaatatctgtttgggcaggccatattggtctatgtatttttaaaatatgtatttctaaatgaaattgagaacatgctttgttttgcctgtcaaggtaatg

SEQ ID NO: 253 - DNA, 3919 bp, Homo sapiens
  misc_feature (1)...(3919): n = A,T,C or G, or insertion/deletion polymorphism (see Tables 1-2)
actccctcactggctgccattgaaagagtccacttctcagtgactcctagctgggcactggatgcagttgaggattgctggtcaatatgattcttcttgctgtgctttttctctgcttcatttcstcatattcagcttctgttaaaggtcacacaactggtctctcattaaataatgaccggctgtacaagctcacgtactccactgaagttcttcttgatcggggcaaaggaaaactgcaagacagcgtgggctaccgcatttcctccaacgtggatgtggccttactatggaggaatcctgatggtgatgatgaccagttgatccaaataacgatgaaggatgtaaatgttgaaaatgtgaatcagcasagaggagasaagagcatcttcaaaggaaaaagcccatctaaaataatgggaaaggaaaacttggaagctctgcaaagacctacgctccttcatctaayccatggaaaggtcaaagagttctactcatatcaaartgaggcagtggccatagaaaatatcaagagaggyctggctagcctatttcagacacagttaagctctggaaccaccantgagrtagatatctctggaaattgyaaagtgacctaccaggctcatcaagacaaagtgatcaaaattaaggccttggattcatgcaaaatagcgaggtctggatttacgaccccaaatcaggtcttgggtgtcagttcaaaagctacatctgtcaccacctataagatagaagacagctttgttatagctgtgcttgctgaagaaacacacaattttggactgaatttcctacaaaccattaaggggaaaatagtatcgaagcagaaattagagctgaagacaaccgaagcaggcccaagattgatgtctggaaagcaggctgcagccataatcaaagcagttgattcaaagtacacggccattcccattgtggggcaggtcttccagagccastgtaaaggatgtccttctctctcggagctctggcggtccacmaggaaatacctgcagcctgacaacctttccaaggcygaggctgtcagaaacttcctggccttcattcagcacctcaggactgcgaagaaagaagagatccttcaaatactaaagatggaaaataaggaagtattacctcagctggtggatgctgtcacctctgctcagacctcagactcattagaagccattttggactttttggatttcaaaagtgmcagcagcattatcctccaggagaggtttctctatgcctgtggatttgcttctcatcccaatgaagaactcctgagagccctcattagtaagttcaaaggttctattggtagcagtgacatcagagaaactgttatgatcatcactgggacacttgtcagaaagttgtgtcagaatgaaggctgcaaactcwaagcagtagtggaagctaagaagttaatcctgggaggacttgaaaaagcagagaaaaaagaggacaccaggatgtatctgctggctttgaagaatgccctgcttccagaaggcatcccaagtcttctgaagtatgcagaagcaggagaagggcccatcagccacctggctaccactgctctccagagatatgatctccctttcataactgatgaggtgaagaagaccttaaacagaatataccaccaaaaccgtaaagttcatgaaaagactgtgcrcactgctgcagctgctatcattttaaataacaatccatcctacatggacgtcaagaacatcctgctgtctattggggagcttccccaagaaatgaataaatacatgctcgccattgttcaagacatcctacgttttgaaatgcctgcaakcaaaattgtccgtcgagttctgaaggaaatggtcgctcacaattatgaccgtttctccaggagtggatcttcttctgcctacactggctacatagaacgtagtccccgttcggcatctacttacagcctagacattctctactcgggttctggcattctaaggagaagtaacctgaacatctttcagtacattgggaaggctggtcttcacggtagccaggtggttattgaagcccaaggactggaagccttaatcgcagccacccctgacgagggggaggagaaccttgactcctatgctggtatgtcagccatcctctttgatgttcagctcagacctgtcacctttttcaacggatacagtgatttgatgtccaaaatgctgtcagcatctggcgaccctatcagtgtggtgaaaggacttattctgctaatagatcattctcaggaacttcagttacaatctggactaaaagccaatatagaggtccagggtggtctagctattgatatttcaggtgcaatggagtttagcttgtggtatcgtgagtctaaaacccgagtgaaawatagggtgactgtggtaataaccactgacatcacagtggactcctcttttgtgaaagctggcctggaaaccagtacagaaacagaagcaggcttggagtttatctccacagtgcagttttctcagtacccattcttagtttgcatgcagatggacaaggatgaagctccattcaggcaatttgagwaaaagtacgaaaggctgtccacaggcagaggttatgtctctcagaaaagaaaagaaagcgtattagcakgatgtgaattcccgctccatcaagagaactcagagatgtgcaaagtggtgtttgcccctcagccggatagtacttccagcggatggttttgaaactgacctgtgatattttacttgaatttgtctccccgaaagggacacaatgtggcatgactaagtacttgctctctgagagcacagcgtttacatatttacctgtatttaagatttttgtaaaaagctacaaaaaactgcagtttgatcaaatttgggtatatgcagtatgctacccacagcgtcattttgaatcatcatgtgacgctttcaacaacgttcttagtttacttatacctctctcaaatctcatttggtacagtcagaatagttattctctaagaggaaactagtgtttgttaaaaacaaaaataaaaacaaaaccacacaaggagaacccaattttgtttcaacaatttttgatcaatgtatatgaagctcttgataggacttccttaagcatgacgggaaaaccaaacacgttccctaatcaggaaaaaaaaaaaaaaaaaaagtaagacacaaacaaaccattttttttctctttttttggagttgggggcccagggagaagggacaagrcttttaaaagacttgttagccaacttcaagaattaatatttatgtctctgttattgttagttttaagccttaaggtagaaggcacatagaaataacatctcatctttctgctgaccattttagtgaggttgttccaaagacattcaggtctctacctccagccctgcaaaaatattggacctagcacagaggaatcaggaaaattaatttcagaaactccatttgatttttcttttgctgtgtctttttgagactgtaatatggtacactgtcctctaagggacatcctcattttatctcacctttttgggggtgagagctctagttcatttaactgtactctgcacaatagctaggatgactaagagaacattgcttcaagaaactggtggatttggatttccaaaatatgaaataaggaaaaaaatgtttttatttgtatgaattaaaagatccatgttgaacatttgcaaatatttattaataaacagatgtggtgataaacccaaaacaaatgacaggtscttattttccactaaacacagacacatgaaatgaaagtttagctagcccactatttgttgtaaattgaaaacgaagtgtgataaaataaatatgtagaaatc

SEQ ID NO: 254 - DNA, 3183 bp, Homo sapiens
gtttttctaaacagcctgacactgaggggaggcagtgagactgtaagcagtctgggttgggcagaaggcagaaaaccagcagagtcacagaggagatggccaactgccaaatagccatcttgtaccagagattccagagagtggtctttggaatttcccaactcctttgcttcagtgccctgatctctgaactaacaaaccagaaagaagtggcagcatggacttatcattacagcacaaaagcatactcatggaatatttcccgtaaatactgccagaatcgctacacagacttagtggccatccagaataaaaatgaaattgattacctcaataaggtcctaccctactacagctcctactactggattgggatccgaaagaacaataagacatggacatgggtgggaaccaaaaaggctctcaccaacgaggctgagaactgggctgataatgaacctaacaacaaaaggaacaacgaggactgcgtggagatatacatcaagagtccrtcagcccctggcaagtggaatgatgagcactgcttgaagaaaaagcacgcattgtgttacacagcctcctgccaggacatgtcctgcagcaaacaaggagagtgcctcgagaccatcgggaactacacctgctcctgttaccctggattctatgggccagaatgtgaatacgtgagagagtgtggagaacttgagctccctcaacacrtgctcatgaactgcagccaycctctgggaaacttctcttttaactcgcagtgcagcttccactgcactgacgggtaccaagtaaatgggcccagcaagctggaatgcttggcttctggaatctggacaaataagcctccacagtgtttagctgcccagtgcccacccctgaagattcctgaacgaggaaacatgayctgccttcattctgcaaaagcattccagcatcagtctagctgcagcttcagttgtgaagagggatttgcattagttggacyggaagtggtgcaatgcacagcctcgggggtatggacagccccagccccagtgtgtaaagctgtgcagtgtcagcacctggaagcccccartgaaggaaccatggactgtgttcatccgctcactgcttttgcctatggctccagctgtaaatttgagtgccagcccggctacagagtgaggggcttggacrtgctccgctgcattgactctggacactggtctgcacccttgccaacctgtgaggctatttcgtgtgagccgctggagagtcctgtccacggaagcatggattgctctccatccttgagagcgtttcagtatgacaccaactgtagcttccgctgtgctgaaggtttcatgctgagaggagccgatatagttcggtgtgataacttgggacagtggacagcaccagccccagtctgtcaagctttgcagtgccaggatctcccagttccaaatgaggcccrggtgaactgctcccaccccttcggtgcctttaggtaccagtcagtctgcagcttcacctgcaatgaaggcttgctcctggtgggagcaagtgtgctacagtgcttggctactggaaactggaattytgttcctccagaatgccaagccattccctgcacacctttgctaagccctcagaatggaacaatgacctgtgttcaacctcttggaagttccagttataaatccacatgtcaattcatctgtgacragggatattctttgtctggaccagaaagattggattgtactcgatcgggacgctggacagactccccaccaatgtgtgaagccatcaagtgcccagaactctttgccccagagcagggcagcctggattgttctgacacycgtggagaattcaatgttggctccacctgycatttctcttgtracaayggctttaagctggaggggcccaataatgtggaatgcacaactkctggaagatggtcagctactccrccaacctgcaaagkcatagcatcacttcctactccagggktgcaatgtccagccctcaccactcctgggcagggaaccatgtactgtaggcatcatccgggramctttggttttaataccacttgttactttggctgcarcgctggattcacactcataggagacagcactctcagctgcagaccttcaggacaatggacagcagtaactccagcatgcagagctgtgaaatgctcagaactacatgttaataagccaatagcgatgaactgctccaacctctggggaaacttcagttatggatcaatctgctctttccattgtctagagggccagttacttaatggctctgcacaaacagcatgccaagagaatggccactggtcamctaccgtgccaacctgccaagatgatgggaaatgccccttgaatcctcacagccacctaggaacatatggagtttttacaaacgctgcatttgacccgagtccttaagagacctgtccttttcctggtctcctcattcagcctccatatgatcctgttgtgaacatcaagtttcctgctacactggacttaactataatgcatttgctgcaggtttccataaacacccatgaatcaaagacatggaattaccttagattagctctggaccagcctgttggacccgctctggaccaaccctgtttcctgagtttgggattgtggtacaatctcaaattctcaacctaccaccccttcctgtcccacctcttctcttcctgtaacacaagccacagaagccaggagcaaatgtttctgcagtagtctctgtgctttgactcacctgttacttgaaataccagtgaaccaaagagactggagcatctgactcacaagaagaccagactgtggagaaataaaaatacctctttattttttgattgaaggaaggttttctccactttgttggaaagcaggtggcatctctaattggaagaaattcctgtagcatcttctggagtctccagtggttgctgttgatgaggcctcttggacctctgctctgaggcttccagagagtcctctggatggcaccagaggctgcagaaggccaagaatcaagctagaaggccacatgtcaccgtggaccttcctgccaccagtcactgtccctcaaatgacccaaasaccaatattcaaatgcgtaattaaaagaattttcccc

SEQ ID NO: 255 - DNA, 3117 bp, Homo sapiens
gtttttctaaacagcctgacactgaggggaggcagtgagactgtaagcagtctgggttgggcagaaggcagaaaaccagcagagtcacagaggagatggccaactgccaaatagccatcttgtaccagagattccagagagtggtctttggaatttcccaactcctttgcttcagtgccctgatctctgaactaacaaaccagaaagaagtggcagcatggacttatcattacagcacaaaagcatactcatggaatatttcccgtaaatactgccagaatcgctacacagacttagtggccatccagaataaaaatgaaattgattacctcaataaggtcctaccctactacagctcctactactggattgggatccgaaagaacaataagacatggacatgggtgggaaccaaaaaggctctcaccaacgaggctgagaactgggctgataatgaacctaacaacaaaaggaacaacgaggactgcgtggagatatacatcaagagtccrtcagcccctggcaagtggaatgatgagcactgcttgaagaaaaagcacgcattgtgttacacagcctcctgccaggacatgtcctgcagcaaacaaggagagtgcctcgagaccatcgggaactacacctgctcctgttaccctggattctatgggccagaatgtgaatacgtgagagagtgtggagaacttgagctccctcaacacrtgctcatgaactgcagccaycctctgggaaacttctcttttaactcgcagtgcagcttccactgcactgacgggtaccaagtaaatgggcccagcaagctggaatgcttggcttctggaatctggacaaataagcctccacagtgtttagctgcccagtgcccacccctgaagattcctgaacgaggaaacatgayctgccttcattctgcaaaagcattccagcatcagtctagctgcagcttcagttgtgaagagggatttgcattagttggacyggaagtggtgcaatgcacagcctcgggggtatggacagccccagccccagtgtgtaaagctatttcgtgtgagccgctggagagtcctgtccacggaagcatggattgctctccatccttgagagcgtttcagtatgacaccaactgtagcttccgctgtgctgaaggtttcatgctgagaggagccgatatagttcggtgtgataacttgggacagtggacagcaccagccccagtctgtcaagctttgcagtgccaggatctcccagttccaaatgaggcccrggtgaactgctcccaccccttcggtgcctttaggtaccagtcagtctgcagcttcacctgcaatgaaggcttgctcctggtgggagcaagtgtgctacagtgcttggctactggaaactggaattytgttcctccagaatgccaagccattccctgcacacctttgctaagccctcagaatggaacaatgacctgtgttcaacctcttggaagttccagttataaatccacatgtcaattcatctgtgacragggatattctttgtctggaccagaaagattggattgtactcgatcgggacgctggacagactccccaccaatgtgtgaagccatcaagtgcccagaactctttgccccagagcagggcagcctggattgttctgacacycgtggagaattcaatgttggctccacctgycatttctcttgtracaayggctttaagctggaggggcccaataatgtggaatgcacaactkctggaagatggtcagctactccrccaacctgcaaagkcatagcatcacttcctactccagggktgcaatgtccagccctcaccactcctgggcagggaaccatgtactgtaggcatcatccgggramctttggttttaataccacttgttactttggctgcarcgctggattcacactcataggagacagcactctcagctgcagaccttcaggacaatggacagcagtaactccagcatgcagagctgtgaaatgctcagaactacatgttaataagccaatagcgatgaactgctccaacctctggggaaacttcagttatggatcaatctgctctttccattgtctagagggccagttacttaatggctctgcacaaacagcatgccaagagaatggccactggtcamctaccgtgccaacctgccaagcaggaccattgactatccaggaagccctgacttactttggtggagcggtggcttctacrataggtctgataatgggtgggacgctcctggctttgctaagaaagcgtttcagacaaaaagatgatgggaaatgccccttgaatcctcacagccacctaggaacatatggagtttttacaaacgctgcatttgacccgagtccttaagagacctgtccttttcctggtctcctcattcagcctccatatgatcctgttgtgaacatcaagtttcctgctacactggacttaactataatgcatttgctgcaggtttccataaacacccatgaatcaaagacatggaattaccttagattagctctggaccagcctgttggacccgctctggaccaaccctgtttcctgagtttgggattgtggtacaatctcaaattctcaacctaccaccccttcctgtcccacctcttctcttcctgtaacacaagccacagaagccaggagcaaatgtttctgcagtagtctctgtgctttgactcacctgttacttgaaataccagtgaaccaaagagactggagcatctgactcacaagaagaccagactgtggagaaataaaaatacctctttattttttgattgaaggaaggttttctccactttgttggaaagcaggtggcatctctaattggaagaaattcctgtagcatcttctggagtctccagtggttgctgttgatgaggcctcttggacctctgctctgaggcttccagagagtcctctggatggcaccagaggctgcagaaggccaagaatcaagctagaaggccacatgtcaccgtggaccttcctgccaccagtcactgtccctcaaatgacccaaasaccaatattcaaatgcgtaattaaaagaattttcccc

SEQ ID NO: 256 - DNA, 3303 bp, Homo sapiens
gtttttctaaacagcctgacactgaggggaggcagtgagactgtaagcagtctgggttgggcagaaggcagaaaaccagcagagtcacagaggagatggccaactgccaaatagccatcttgtaccagagattccagagagtggtctttggaatttcccaactcctttgcttcagtgccctgatctctgaactaacaaaccagaaagaagtggcagcatggacttatcattacagcacaaaagcatactcatggaatatttcccgtaaatactgccagaatcgctacacagacttagtggccatccagaataaaaatgaaattgattacctcaataaggtcctaccctactacagctcctactactggattgggatccgaaagaacaataagacatggacatgggtgggaaccaaaaaggctctcaccaacgaggctgagaactgggctgataatgaacctaacaacaaaaggaacaacgaggactgcgtggagatatacatcaagagtccrtcagcccctggcaagtggaatgatgagcactgcttgaagaaaaagcacgcattgtgttacacagcctcctgccaggacatgtcctgcagcaaacaaggagagtgcctcgagaccatcgggaactacacctgctcctgttaccctggattctatgggccagaatgtgaatacgtgagagagtgtggagaacttgagctccctcaacacrtgctcatgaactgcagccaycctctgggaaacttctcttttaactcgcagtgcagcttccactgcactgacgggtaccaagtaaatgggcccagcaagctggaatgcttggcttctggaatctggacaaataagcctccacagtgtttagctgcccagtgcccacccctgaagattcctgaacgaggaaacatgayctgccttcattctgcaaaagcattccagcatcagtctagctgcagcttcagttgtgaagagggatttgcattagttggacyggaagtggtgcaatgcacagcctcgggggtatggacagccccagccccagtgtgtaaagctgtgcagtgtcagcacctggaagcccccartgaaggaaccatggactgtgttcatccgctcactgcttttgcctatggctccagctgtaaatttgagtgccagcccggctacagagtgaggggcttggacrtgctccgctgcattgactctggacactggtctgcacccttgccaacctgtgaggctatttcgtgtgagccgctggagagtcctgtccacggaagcatggattgctctccatccttgagagcgtttcagtatgacaccaactgtagcttccgctgtgctgaaggtttcatgctgagaggagccgatatagttcggtgtgataacttgggacagtggacagcaccagccccagtctgtcaagctttgcagtgccaggatctcccagttccaaatgaggcccrggtgaactgctcccaccccttcggtgcctttaggtaccagtcagtctgcagcttcacctgcaatgaaggcttgctcctggtgggagcaagtgtgctacagtgcttggctactggaaactggaattytgttcctccagaatgccaagccattccctgcacacctttgctaagccctcagaatggaacaatgacctgtgttcaacctcttggaagttccagttataaatccacatgtcaattcatctgtgacragggatattctttgtctggaccagaaagattggattgtactcgatcgggacgctggacagactccccaccaatgtgtgaagccatcaagtgcccagaactctttgccccagagcagggcagcctggattgttctgacacycgtggagaattcaatgttggctccacctgycatttctcttgtracaayggctttaagctggaggggcccaataatgtggaatgcacaactkctggaagatggtcagctactccrccaacctgcaaagkcatagcatcacttcctactccagggktgcaatgtccagccctcaccactcctgggcagggaaccatgtactgtaggcatcatccgggramctttggttttaataccacttgttactttggctgcarcgctggattcacactcataggagacagcactctcagctgcagaccttcaggacaatggacagcagtaactccagcatgcagagctgtgaaatgctcagaactacatgttaataagccaatagcgatgaactgctccaacctctggggaaacttcagttatggatcaatctgctctttccattgtctagagggccagttacttaatggctctgcacaaacagcatgccaagagaatggccactggtcamctaccgtgccaacctgccaagcaggaccattgactatccaggaagccctgacttactttggtggagcggtggcttctacrataggtctgataatgggtgggacgctcctggctttgctaagaaagcgtttcagacaaaaagatgatgggaaatgccccttgaatcctcacagccacctaggaacatatggagtttttacaaacgctgcatttgacccgagtccttaagagacctgtccttttcctggtctcctcattcagcctccatatgatcctgttgtgaacatcaagtttcctgctacactggacttaactataatgcatttgctgcaggtttccataaacacccatgaatcaaagacatggaattaccttagattagctctggaccagcctgttggacccgctctggaccaaccctgtttcctgagtttgggattgtggtacaatctcaaattctcaacctaccaccccttcctgtcccacctcttctcttcctgtaacacaagccacagaagccaggagcaaatgtttctgcagtagtctctgtgctttgactcacctgttacttgaaataccagtgaaccaaagagactggagcatctgactcacaagaagaccagactgtggagaaataaaaatacctctttattttttgattgaaggaaggttttctccactttgttggaaagcaggtggcatctctaattggaagaaattcctgtagcatcttctggagtctccagtggttgctgttgatgaggcctcttggacctctgctctgaggcttccagagagtcctctggatggcaccagaggctgcagaaggccaagaatcaagctagaaggccacatgtcaccgtggaccttcctgccaccagtcactgtccctcaaatgacccaaasaccaatattcaaatgcgtaattaaaagaattttcccc

SEQ ID NO: 257 - DNA, 3199 bp, Homo sapiens
gtttttctaaacagcctgacactgaggggaggcagtgagactgtaagcagtctgggttgggcagaaggcagaaaaccagcagagtcacagaggagatggccaactgccaaatagccatcttgtaccagagattccagagagtggtctttggaatttcccaactcctttgcttcagtgccctgatctctgaactaacaaaccagaaagaagtggcagcatggacttatcattacagcacaaaagcatactcatggaatatttcccgtaaatactgccagaatcgctacacagacttagtggccatccagaataaaaatgaaattgattacctcaataaggtcctaccctactacagctcctactactggattgggatccgaaagaacaataagacatggacatgggtgggaaccaaaaaggctctcaccaacgaggctgagaactgggctgataatgaacctaacaacaaaaggaacaacgaggactgcgtggagatatacatcaagagtccrtcagcccctggcaagtggaatgatgagcactgcttgaagaaaaagcacgcattgtgttacacagcctcctgccaggacatgtcctgcagcaaacaaggagagtgcctcgagaccatcgggaactacacctgctcctgttaccctggattctatgggccagaatgtgaatacgtgagagagtgtggagaacttgagctccctcaacacrtgctcatgaactgcagccaycctctgggaaacttctcttttaactcgcagtgcagcttccactgcactgacgggtaccaagtaaatgggcccagcaagctggaatgcttggcttctggaatctggacaaataagcctccacagtgtttagctgcccagtgcccacccctgaagattcctgaacgaggaaacatgayctgccttcattctgcaaaagcattccagcatcagtctagctgcagcttcagttgtgaagagggatttgcattagttggacyggaagtggtgcaatgcacagcctcgggggtatggacagccccagccccagtgtgtaaagctgtgcagtgtcagcacctggaagcccccartgaaggaaccatggactgtgttcatccgctcactgcttttgcctatggctccagctgtaaatttgagtgccagcccggctacagagtgaggggcttggacrtgctccgctgcattgactctggacactggtctgcacccttgccaacctgtgaggctatttcgtgtgagccgctggagagtcctgtccacggaagcatggattgctctccatccttgagagcgtttcagtatgacaccaactgtagcttccgctgtgctgaaggtttcatgctgagaggagccgatatagttcggtgtgataacttgggacagtggacagcaccagccccagtctgtcaagctttgcagtgccaggatctcccagttccaaatgaggcccrggtgaactgctcccaccccttcggtgcctttaggtaccagtcagtctgcagcttcacctgcaatgaaggcttgctcctggtgggagcaagtgtgctacagtgcttggctactggaaactggaattytgttcctccagaatgccaagccattccctgcacacctttgctaagccctcagaatggaacaatgacctgtgttcaacctcttggaagttccagttataaatccacatgtcaattcatctgtgacragggatattctttgtctggaccagaaagattggattgtactcgatcgggacgctggacagactccccaccaatgtgtgaagccatcaagtgcccagaactctttgccccagagcagggcagcctggattgttctgacacycgtggagaattcaatgttggctccacctgycatttctcttgtracaayggctttaagctggaggggcccaataatgtggaatgcacaactkctggaagatggtcagctactccrccaacctgcaaagkcatagcatcacttcctactccagggktgcaatgtccagccctcaccactcctgggcagggaaccatgtactgtaggcatcatccgggramctttggttttaataccacttgttactttggctgcarcgctggattcacactcataggagacagcactctcagctgcagaccttcaggacaatggacagcagtaactccagcatgcagagctgtgaaatgctcagaactacatgttaataagccaatagcgatgaactgctccaacctctggggaaacttcagttatggatcaatctgctctttccattgtctagagggccagttacttaatggctctgcacaaacagcatgccaagagaatggccactggtcamctaccgtgccaacctgccaagcaggaccattgactatccaggaagccctgacttactttggtggagcggtggcttctacrataggtctgataatgggtgggacgctcctggctttgctaagaaagcgtttcagacaaaaagatgatgggaaatgccccttgaatcctcacagccacctaggaacatatggagtttttacaaacgctgcatttgacccgagtccttaaggtttccataaacacccatgaatcaaagacatggaattaccttagattagctctggaccagcctgttggacccgctctggaccaaccctgtttcctgagtttgggattgtggtacaatctcaaattctcaacctaccaccccttcctgtcccacctcttctcttcctgtaacacaagccacagaagccaggagcaaatgtttctgcagtagtctctgtgctttgactcacctgttacttgaaataccagtgaaccaaagagactggagcatctgactcacaagaagaccagactgtggagaaataaaaatacctctttattttttgattgaaggaaggttttctccactttgttggaaagcaggtggcatctctaattggaagaaattcctgtagcatcttctggagtctccagtggttgctgttgatgaggcctcttggacctctgctctgaggcttccagagagtcctctggatggcaccagaggctgcagaaggccaagaatcaagctagaaggccacatgtcaccgtggaccttcctgccaccagtcactgtccctcaaatgacccaaasaccaatattcaaatgcgtaattaaaagaattttcccc

SEQ ID NO: 258 - DNA, 7009 bp, Homo sapiens
gaaaaagcggagggagtgagagccagaggctgctgctgccgtttgcaagaactgcaggggaggaggacgctgccacccacagcctctagagctcattgcagctgggacagcccggagtgtggttagcagctcggcaagcgctgcccaggtcctggggtggtggcagccagcgggagcaggaaaggaagcatgttcccaggctgcccacgcctctgggtcctggtggtcttgrgcaccagctgggtaggctgggggagccaagggacagaagcggcacagctaaggcagttctacgtggctgctcagggcatcagttggagctaccgacctgagcccacaaactcaagtttgaatctttctgtaacttcctttaagaaaattgtctacagagagtatgaaccatattttaagaaagaaaaaccacartctaccatttcaggacttcttgggcctactttatatgctgaagtcggagacatcataaaagttcactttaaaaataaggcasataagcccttgagcatccatcctcaaggaattaggtacagtaaattatcagaaggtgcttcttaccttgaccacacattccctgcrgagaagatggacgacgctgtggctccaggccgagaatacacctatgaatggagtatcagtgaggacagtggacccacccatgatgaccctccatgcctcacacacatctattactcccatgaaaatctgatcgaggatttcaactckgggctgattggscccctgcttatctgtaaaaaagggaccctaactgagggtgggacacagaagacgtttgacaagcaaatcgtgctactatttgctgtgtttgatgaaagcaagagctggagccagtcatcatccctaatgtacacagtcaatggatatgtgaatgggacaatgccagatataacagtttgtgyccatgaccacatcagctggcatctgctgggaatgagctcggggccagaattattctccattcatttcaacggccaggtcctggagcagaaccatcataaggtctcagccatcacccttgtcagtgctacatccactaccgcaaatatgactgtgggcccagagggaaagtggatcatatcttctctcaccccaaaacatttgcaagctgggatgcaggcttacattgacattaaaaactgcccaaagaaaaccrsgaatcttaagwaaataactcgtgagcagaggcggcacatgaagaggtgggaatacttcattgctgcagaggaagtcatttgggactatgcacctgtaataccagcgaatatggacaaaaaatacaggtctcagcatttggataatttctcaaaccaaattggaaaacattataagaaagttatgtacacacagtacgaagatgagtccttcaccaaacatacagtgaatcccaataygaargaagatgggattttgggtcctattatcagagcccaggtcagagacacactcaaaatcgtgttcaaaaatatggccagccgcccctatagcatttaccctcatggagtgaccttctcgccttatgaagatgaagtcaaytcttctttcacctcaggcaggaacaacaccatgatcagagcagttcaaccaggggaaacctatacttataagtggaacatcttagagtttgatgaacccacagaaaatgatgcccagtgcttaacaagaccatactacagtgacgtggacatcatgaragacatcgcctctgggctaataggactacttctaatctgtaagagcagatccctggacaggyraggaatacagagggcagcagacatcgaacagcaggctgtgtttgctgtgtttgatgagaacaaaagctggtmccttgaggacaacatcaacaagttttgtgaaaatcctgatgargtgaaacgtgatgaccccaagttttatgaatcaaacatcatgagcactatcaatggctatgtgcctgagagcataactactcttggattctgctttgatgacactgtccagtggcacttcygtagtgtggggacccagaatgaaattttgaccatccacttcactgggcactcattcatctatggaaagaggcatgaggacaccttgacmctcttccccatgcgtggagaatctgtgacggtcacaatggataatgttggaacttggatgttaacttccatgaattctagtccaagaagcaaaaagctgaggctgaaattcagggatgttaaatgtatcccagatgatgatgaagactcatatgagatttttgaacctccagaatctacagtcatggctacacggaaaatgcatgatcgtttagaacctgaagatgaagagagtgatgctgactatgattaccagaacagactggctgcagcattaggaatyaggtcattcygaaactcatcattgaaycaggaagaagaagagttcaatcttactgccctagctctggagaatggcactgarttcgtttcttcraacacagatataattgttggttcaaattattcttccccaagtaatattagtaagttcactgtcaataaccttgcagaacctcagaaagccccttctcacyaacaagccaccacagctggttccycactgagacacctcattggcaagamctcagttctcaattcttccacagcagagcattccagcccatattctgaagaccctatagaggatcctctacagccagatgtcacagggatacgtctactttcacttggtgctggagaattcaraagtcaagaacatgctaagcrtaagggacccaaggtagaaagagatcaagcagcaaagcacaggttctcctggatgaaattactagcacataaagttgggagacacctaagccaagacactggttctccttccggaatgaggccctgggaggaccttcctagccaagacactggttctccttccagaatgaggccctggraggaccctcctagtgatctgttactcttaaaacaaagtaactcatctaagattttggttgggagatggcatttggcttctgagaaaggtagctatgaaataatccaagatactgatgaagacacagctgttarcaattggctgatcagcccccagaatgcctcacgtgcttggggagaaagcacccctcttgccaacaagcctggaaagcagagtggccacccaaagtttcctagagttagacataaatctctacaagtaagacaggatggaggaaagagtagactgaagaaaagccagtttctcattaagacacgaaaaaagaaaaaagagaagcacacacaccatgctcctttatctccgaggacctttcaccctctaagaagtgaagcctacaacacattttcagaaagaagacttaagcattcgttggtgcttcataaatccaatgaaacatctcttcccacagacctcaatcagacrttgccctctatggattttggctggatagcctcacttcctgaccataatcagaattcctcaaatgacactggtcaggcaagctgtcctccaggtctttatcagacagtgcccccagaggaacactatcaaacattccccattcaagaccctgatcaaatgcactctacttcagaccccagtcasagatcctcttctccagagctcagtgaaatgcttgagtatgacygaagtcacaagtccttccccacagatataagtcaaatgtccccttcctcagaacatgaagtctggcagacagtcatctctccagacctcagccaggtgacyctctctccagaactcagccagacaaacctctctccagacctcagccacacgactctctctccagaactcattcagagaaacctttccccagccctcggtcagatgcccatttctccagacctcagccatacaaccctttctccagacctcagccatacaaccctttctttagacctcagccagacaaacctctctccagaactcagtcagacaaacctttcyccagccctcggtcagatgcccctttctccagacctcagccatacaaccmtttctctagacttcagccagacaaacctctctccagaactcagccatatgactctctctccagaactcagtcagacaaacctttccccagccctcggtcagatgcccatttctccagacctcagccrtacaaccctttctctagacttcagccagacaaacctctctccagaactcagtcaaacaaacctttccccagccctcggtcagatgcccctttctccagaccccagccatacaacyctttctctagacctcagccagacaaacctctctccagaactcagtcagacaaacctttccccagacctcagtgagatgcccctctttgcagatctcagtcaaattccccttaccccagacctcgaccagatgacactttctccagaccttggtgagacagatctttccccaaactttggtcagatgtccctttccccagacctcagccaggtgactctctctccagacatcagtgacaccacccttctcccggatctcagccagatatcacctcctccagaccttgatcagatattctacccttctgaatctagtcagtcattgcttcttcaagaatttaatgagtcttttccttatccagaccttggtcagatgccatctccttcatctcctactctcaatgatacttttctatcaaaggaatttaatccactggttatagtgggcctcagtaaagatggtacagattacattgagatcattccaaaggaagmggtccagagcagtgaagatgactatgctgaaattgattatgtgccctatgatgacccctacaaaactgatgttaggacaaacatcaactcctccagagatcctgacaacattgcagcatggtacctccgcagcaacaatggaaacagaagaaattattacattgctgctgaagaaatatcctgggattattcagaatttgtacaaagggaaacagatattgaagactctgatgatattccagaagataccacatataagaaagtagtttttcgaaagtacctcgacagcacttttaccaaacgtgatcctcgaggggagtatgaagagcatctcggaattcttggtcctattatcagagctgaagtggatgatgttatccaagttcgttttaaaaatttagcatccagaccgtattctctacatgcccatggrctttcctatgaaaaatcatcagagggaaagasttatgaagatgactctcctgaatggtttaaggaagataatgctgttcagccaaatagcagttatacctacgtatggcatgccactgagcgatcagggccagaaagtcctggctctgcctgtcgggcttgggcctrctactcagctgtgaacccagaaaaagatattcactcaggcttgataggtcccctcstaatctgccaaaaaggaatactacataaggacagcaacatgcctrtggacatgagagaatttgtcttactatttatgacctttgatgaaaagaagagctggtactatgaaaagaagtcccgaagttcttggagactcacatcctcagaaatgaaaaaatcccatgagtttcacgccattaatgggatgatctacagcttgcctggcctgaaaatrtatgagcaagagtgggtgaggttacacctgctgaacataggcggctcccaagacattcacgtggttcactttcacggccagaccttgctggaaaatggcaataaacagcaccagttaggggtctggccccttctgcctggttcatttaaaactcttgaaatgaaggcatcaaaacctggctggtggctcctaaacacagaggttggagaaaaccagagagcagggatgcaaacgccatttcttatcatggacagagactgtaggatgccaatgggactaagcactggtatcatatctgattcacagatcaaggcttcagagtttctgggttactgggagcccagattagcaagattaaacaatggtggatcttataatgcttggagtgtagaaaaacttgcagcagaatttgcctctaaaccttggatccaggtggacatgcaaaaggaagtcataatcacagggatccagacccaaggtgccaaacactacctgaagtcctgctataccacagagttctatgtagcttacagttccaaccagatcaactggcagatcttcaaagggaacagcacaaggaatgtgatgtattttaatggcaattcagatgcctctacaataaaagagaatcagtttgacccacctattgtggctagatatattaggatctctccaactcgagcctataacagacctacccttcgattggaactgcaaggttgtgaggtaaatggatgttccacacccctgggtatggaaaatggaaagatagaaaacaagcaaatcacagcttcttcgtttaagaaatcttggtggggagattactgggaacccttccgtgccyrtctraatgcccagggacgtgtgaatgcctggcaagccaaggcaaacaacaataagcagtggctagaaattgatctactcaagatcaagaagataacggcaattataacacagggctgcaagtctctgtcctctgaaatgtatgtaaagagctataccatccactacagtgagcagggagtggaatggaaaccatacaggctgaaatcctccatggtggacaagatttttgaaggaaatactaataccaaaggacatgtgaagaactttttcaaccccccaatcatttccaggtttatccgtgtcattcctaaaacatggaatcaaagtattgcacttcgcctggaactctttggctgtgrtatttactagaattgaacattcaaaaacccctggaagagactctttaagacctcaaaccatttagaatgggcaatgtattttacgctgtgttaaatgttaacagttttccactatttctctttcttttctattagtgaataaaattttatacaag

SEQ ID NO: 259 - DNA, 2521 bp, Homo sapiens
ccctgtctgtgtgcagaggggattcaacttcaatttttctgcagtggctctgggtccagccccttattcacagatctggaaagcatgaagactgggctttttttcctatgtctcttgggaactgcagctgcaatcccgacaaatgcaagattattatctgatcattccaaaccaactgctgaaacggtagcaccygacaacactgcaatccccagtttaagggctgaagmtgragaaaatgaaaaagaaacagcagtatccacagaagacgattcccaccataaggctgaaaaatcatcagtactaaagtcaaaagaggaaagccatgaacagtcagcagaacagggcaagagttctagccaagagctgggattgaaggatcaagaggacagtgatggtsacttaagtgtgaatttggagtatgcaccaactgaaggtacattggacataaaagaagatatgagtgagcctcaggagaaaaaactctcagagaacactgattttttggctcctggtgttagttccttcacagattctaaccaacaagaaagtatcacaaagagagaggaaaaccaagaacaacctagaaattattcacatcatcagttgaacaggagcagtaaacatagccaaggcctaagggatcaaggaaaccaagagcaggatccaaatatttccaatggagaagaggaagaagaaaaagagccaggtgaagttggtacccacaatgataaccaagaaagaaagacagaattgcccagggagcatgctaacagcaagcaggaggaagacaatacccaatctgatgatattttggaagagtctgatcaaccaactcaagwaagcaagatgcaggaggatgaatttgatcagggtaaccaagaacaagaagataactccaatgcagaaatggaagaggaaaatgcatcgaacgtcaataagcacattcaagaaactgaatggcagagtcaagagggtaaaactggcctagaagctatcagcaaccacaaagagacagaagaaaagactgtttctgaggctctgctcatggaacctactgatgatggtaataccacgcccagaaatcatggagttgatgatgatggcgatgatgatggcgatgatggcggcactgatggccccaggcacagtgcaagtgatgactacttcatcccaagccaggcctttctggaggccgagagagctcaatccattgcctatcacctcaaaattgaggagcaaagagaaaaagtacatgaaaatgaaaatataggtaccactgagcctggagagcaccaagaggccaagaaagcagagaactcatcaaatgaggaggaarcgtcaagtgaaggcaacatgagggtgcatgctgtggattcttgcatgagcttccagtgtaaaagaggccacatctgtaaggcagaccaacagggaaaacctcactgtgtctgccaggatccagtgacttgtcctccaacaaaaccccttgatcaagtttgtggcactgacaatcagacctatgctagttcctgtcatctattcgctactaaatgcagactggaggggaccaaaaaggggcatcaactccagctggattattttggagcctgcaaatctattcctacttgtacggactttgaagtgattcagtttcctctacggatgagagactggctcaagaatatcctcatgcagctttatgaagccaactctgaacacgctggttatctaaatgagaagcagagaaataaagtcaagaaaatttacctggatgaaaagaggcttttggctggggaccatcccattgaycttctcttaagggactttaagaaaaactaccacatgtatgtgtatcctgtgcactggcagtttagtgaacttgaccaacaccctatggatagagtcttgacacattctgaacttgctcctctgcgagcatctctggtgcccatggaacactgcataacccgtttctttgaggagtgtgaccccaacaaggataagcacatcaccctgaaggagtggggccactgctttggaattaaagaagaggacatagatgaaaatctcttgttttgaacgaagattwtaaagaactcaactttccagcatcctcctctgttctaaccacttcagaaatatatgcagctgtgatacttgtagatttatatttagcaaaatgttagcatgtatgacaagacaatgagagtaattgcttgacaacaacctatgcaccaggtatttaacattaactttggaaacaaaaatgtacaattaagtaaagtcaacatatgcaaaatactgtacattgtgaacagaagtttaattcatagtaatttcactctctgcattgacttatgagataattaatgattaaactattaatgataaaaataatgcatttgtattgttcataatatcatgtgcacttcaagaaaatggaatgctactcttttgtggtttacgtgtattattttcaatatcttaataccctaataaagagtccataaaaatccaaatg

SEQ ID NO: 260 - DNA, 2860 bp, Homo sapiens
gctctgagaacaagagcttgaggggaagactgttaaccccatccacgccaccagaattagctctttcccttttggtttgcaagcactgcctgtaaagccctcgcatgagaggccagcctgctagggaaatccaggaatctgcaacaaaaacgatgacagtctgaaatactctctggtgccaacctccaaattctcgtctgtcacttcagacccccactagttgacagagcagcagaatwtcaactccagtagacttgaatrtgcctctgggcaaagaagcagagctaacgaggaaagggatttaaagagtttttcttgggtgtttgtcaaacttttattccctgtctgtgtgcagaggggattcaacttcaatttttctgcagtggctctgggtccagccccttacttaaagatctggaaagcatgaagactgggctttttttcctatgtctcttgggaactgcagctgcaatcccgacaaatgcaagattattatctgatcattccaaaccaactgctgaaacggtagcaccygacaacactgcaatccccagtttaagggctgaagmtgragaaaatgaaaaagaaacagcagtatccacagaagacgattcccaccataaggctgaaaaatcatcagtactaaagtcaaaagaggaaagccatgaacagtcagcagaacagggcaagagttctagccaagagctgggattgaaggatcaagaggacagtgatggtsacttaagtgtgaatttggagtatgcaccaactgaaggtacattggacataaaagaagatatgagtgagcctcaggagaaaaaactctcagagaacactgattttttggctcctggtgttagttccttcacagattctaaccaacaagaaagtatcacaaagagagaggaaaaccaagaacaacctagaaattattcacatcatcagttgaacaggagcagtaaacatagccaaggcctaagggatcaaggaaaccaagagcaggatccaaatatttccaatggagaagaggaagaagaaaaagagccaggtgaagttggtacccacaatgataaccaagaaagaaagacagaattgcccagggagcatgctaacagcaagcaggaggaagacaatacccaatctgatgatattttggaagagtctgatcaaccaactcaagwaagcaagatgcaggaggatgaatttgatcagggtaaccaagaacaagaagataactccaatgcagaaatggaagaggaaaatgcatcgaacgtcaataagcacattcaagaaactgaatggcagagtcaagagggtaaaactggcctagaagctatcagcaaccacaaagagacagaagaaaagactgtttctgaggctctgctcatggaacctactgatgatggtaataccacgcccagaaatcatggagttgatgatgatggcgatgatgatggcgatgatggcggcactgatggccccaggcacagtgcaagtgatgactacttcatcccaagccaggcctttctggaggccgagagagctcaatccattgcctatcacctcaaaattgaggagcaaagagaaaaagtacatgaaaatgaaaatataggtaccactgagcctggagagcaccaagaggccaagaaagcagagaactcatcaaatgaggaggaarcgtcaagtgaaggcaacatgagggtgcatgctgtggattcttgcatgagcttccagtgtaaaagaggccacatctgtaaggcagaccaacagggaaaacctcactgtgtctgccaggatccagtgacttgtcctccaacaaaaccccttgatcaagtttgtggcactgacaatcagacctatgctagttcctgtcatctattcgctactaaatgcagactggaggggaccaaaaaggggcatcaactccagctggattattttggagcctgcaaatctattcctacttgtacggactttgaagtgattcagtttcctctacggatgagagactggctcaagaatatcctcatgcagctttatgaagccaactctgaacacgctggttatctaaatgagaagcagagaaataaagtcaagaaaatttacctggatgaaaagaggcttttggctggggaccatcccattgaycttctcttaagggactttaagaaaaactaccacatgtatgtgtatcctgtgcactggcagtttagtgaacttgaccaacaccctatggatagagtcttgacacattctgaacttgctcctctgcgagcatctctggtgcccatggaacactgcataacccgtttctttgaggagtgtgaccccaacaaggataagcacatcaccctgaaggagtggggccactgctttggaattaaagaagaggacatagatgaaaatctcttgttttgaacgaagattwtaaagaactcaactttccagcatcctcctctgttctaaccacttcagaaatatatgcagctgtgatacttgtagatttatatttagcaaaatgttagcatgtatgacaagacaatgagagtaattgcttgacaacaacctatgcaccaggtatttaacattaactttggaaacaaaaatgtacaattaagtaaagtcaacatatgcaaaatactgtacattgtgaacagaagtttaattcatagtaatttcactctctgcattgacttatgagataattaatgattaaactattaatgataaaaataatgcatttgtattgttcataatatcatgtgcacttcaagaaaatggaatgctactcttttgtggtttacgtgtattattttcaatatcttaataccctaataaagagtccataaaaatccaaatg

SEQ ID NO: 261 - DNA, 2252 bp, Homo sapiens
aattctcgcccaaggacagacctgaatctctagctgcctagaggctgactcaactgaaatcatggcgtttgacagcacttggaaggtagaccggagtgaaaactatgacaagttcatggaaaaaatgggtgttaatatagtgaaaaggaagcttgcagctcatgacaatttgaagctgacaattacacaagaaggaaataaattcacagtcaaagaatcaagcrcttttcgaaacattgaagttgtttttgaacttggtgtcacctttaattacaayctagcagacggaactgaactcagggggacctggagccttgagggaaataaacttattggaaaattcaaacggacagacaatggaaacgaactgaatactgtccgagaaattataggtgatgaactagtccagacttatgtrtatgaaggagtagaagccaaaaggatctttaaaaaggattgagcattattcttggcrcacagtccaaaatacaaattggacagaagatctatattgtaccagaactrtttatttcaccccatcaagtataaggttactgattgattggtccttttataaacattggtatatttccattcatgccaaagcaaaagaagtaaaagctaattaggatttaatttgttttatattctctaagatatatatttactaaaagaatttgtgacattttaaaaaacaaaaataaatattgcgtccatgttgctttatatgtagccttgccttttaaaagaaaaagtatgtgaatatgaattgacagactgttttcgtagagagagggtcttactctttcactcaggctggaatgtagtggagagatcatagctcactgtaacctcaaactcctggactcatgcaatcttcctgcctcaggcttctgagtagctaggactatgggtacattccacagtgcccagctaatttttgttttgttttctttttattttttttagagatggggtcttgctatattgcccaggctggtcttgaacccctggcctcaagcaatcctcctgcctcagcctctcaagttgttttttttctttacatttgataaactaaaagcataggctgcatatgagtctttaacatcttgaactggttgtgaataattttctggcactggttgtaagtaatatctattattataaaaataatatatgctcaaccagaaaacttagaaataagaaacacaaatgtaaaataagtatttccataactcataatccagagataattgccattctgattttgatagatatcctctcagctctcttccctgggggcagatatttcccaatacataccactttgaataggatgataggaaataaatgatgtactacattaaattaaattattgtattacatttttgtacacatcagtcattcccacgcttggctgaaaatcaggatcatctgagaaacttaaacaatttctgcattcttaatctccactgttattctattatatcagaatcgctaatagaaccaagaattctagaaaatttcctggtgattctgatgcagcctgtccactaacttgtctttgagaacaatggagatatcagttatcaatgttatttttaaccacccccttcttttttgttgttgtgggttttttcacataaacacatacattgccaattttccagggctcaaaaagtttccttttattcatattttcacatgacgtaaaattttatgtgcttcacataattgtattttagcagggtacatattaggggatggagagggggtacaatttttaagcatttgcagctgcaactctatagacttttgacaaattctttttcacactgatgtagataacagcttaacatttacatagttcttackacttgccacacactgttctaagtggtatatacatatgacatatatattaaaatgtaggaagaaaaatgtttgagtacctgatgaaaatgaatagagagtatgtaatctttgaaagstgaatactgygtgttctcacttataagtgggagctaaataatgtatacacatggacacaccagagtgtagaataatagacactggagacttggaagagttggagggttggcagggggcgatgataatttacttaatgggtacaatgtacattattcagggggtgatggttacagcccagactttaccactatgcaatatatcaatgtaacaaaactatacttgtactccttaaatttatataaaaataccttaaatctat

SEQ ID NO: 262 - DNA, 2260 bp, Homo sapiens
aagcccagcagccccggggcggatggctccggccgcctggctccgcagcgcggccgcgcgcgccctcctgcccccgatgctgctgctgctgctccagccgccgccgctgctggcccgggctctgccgccggacgyccaccacctccatgccgagaggagggggccacagccctggcatgcagccctgcccagtagcccggcacctgcccctgccacgcaggaagccccccggcctgccagcagcctcaggcctccccgctgtggcgtgcccgacccatctgatgggctgagtgcccgcaaccgacagaagaggttcgtgctttctggcgggcsctgggagaagacggacctcacctacaggatccttcggttcccatggcagttggtgcaggagcaggtgcggcagacgatggcagaggccctaaaggtatggagcgatgtgacgccactcacctttactgaggtgcacgagggccgtgctgacatcatgatcgacttcgccaggtactggcatggggacgacctgccgtttgatgggcctgggggcatcctggcccatgccttcttccccaagactcaccgagaaggggatgtccacttcgactatgatgagacctggactatcggggatgaccagggcacagacctgctgcaggtggcagcccatgaatttggccacgtgctggggctgcagcacacaacagcagccaaggccctgatgtccgccttctacacctttcgctacccactgagtctcagcccagatgactgcaggggcgttcaacacctatatggccagccctggcccactgtcacctccaggaccccagccctgggcccccaggctgggatagacaccaatgagattgcaccgctggagccagacgccccgccagatgcctgtgaggcctcctttgacgcggtctccaccatccgaggcgagctctttttcttcaaagcgggctttgtgtggcgcctccgtgggggccagctgcagcccggctacccagcattggcctctcgccactggcagggactgcccagccctgtggacgctgccttcgaggatgcccagggccacatttggttcttccaaggtgctcagtactgggtgtacgacggtgaaaagccagtcctgggcccygcacccctcacmgagctgggcctggtgaggttcccggtccatgctgccttggtctggggtcccgagaagaacaagatctacttcttccgaggcagggactactggcgtttccaccccagcacccggcgtgtagacagtcccgtgccccgcagggccactgactggagaggggtgccctctgagatcgacgctgccttccaggatgctgatggctatgcctacttcctgygcggccgcctctactggaagtttgaccctgtgaaggtgaaggctctggaaggcttcccccgtctcgtgggtcctgacttctttggctgtgccgagcctgccaacactttcctctgaccatggcttggatgccctcaggggtgctgacccctgccaggccacgaatatcaggctagagacccatggccatctttgtggctgtgggcaccaggcatgggactgagcccatgtctcctcagggggatggggtggggtacaaccaccatgacaactgccgggagggccacgcaggtcgtggtcacctgccagcgactgtctcagactgggcagggaggctttggcatgacttaagaggaagggcagtcttgggcccgctatgcaggtcctggcaaacctggctgccctgtctccatccctgtccctcagggtagcaccatggcaggactgggggaactggagtgtccttgctgtatccctgttgtgaggttccttccaggggctggcactgaagcaagggtgctggggccccatggccttcagccctggctgagcaactgggctgtagggcagggccacttcctgaggtcaggtcttggtaggtgcctgcatctgtctgccttctggctgacaatcctggaaatctgttctccagaatccaggccaaaaagttcacagtcaaatggggaggggtattcttcatgcaggagaccccaggccctggaggctgcaacatacctcaatcctgtcccaggccggatcctcctgaagcccttttcgcagcactgctatcctccaaagccattgtaaatgtgtgtacagtgtgtataaaccttcttcttcttttttttttttaaactgaggattgtcattaaacacagttgttttcta

SEQ ID NO: 263 - DNA, 3442 bp, Homo sapiens
  misc_feature (1)...(3442): n = A,T,C or G, or insertion/deletion polymorphism (see Tables 1-2)
agctgtggggtctgtaacaacatggcagctcccatgagaacggcatggttggagtcagaagaggaagaagcagaactgggcaggactccagaccccatcctcccaactccacccactttagtctccatggagacccaagggcggctttagggcctctggcactgaagatggaatagctttgccttgtggatctgacctcctgggactccagcgctcctaaaggcagactctcagggcttggaaggtagaagcatgctacaagaaggcaatgtctgttcaaaggtttagacaggatgagagtccatcccaggccacacagcagactggcrgccaagctggcagggctggaaccagagaccccctaccctgggtttgaattctctgagctggtgacaggtgccacaggcactggggatctcaccagaaaggaaccgacggagctagrggccagcgagatggcggacgaggccttagctgggctggatgagggagcccttcggaagctgstggaggtcacagcagatctggcagagcggcggcgcatccgctcagccatccgggaactgcagcggcaggagctggagcgcgaggaggaggccctggcatccaagcgtttccgtgccgagcggcaggacaacaaggagaactggctgcactctcagcagcgggaagctgagcagcgggctgccctggcacggctggcagggcagctggagtccatgaacgatgtggaggaattgactgcactgttgcgaagcgctggtgagtatgaggagcgcaagctgatccgagctgccatccgccgtgtacgggctcaggagattgaggctgccaccttggctgggaggttgtacagcgggcgtcccaacagtggctcaagagaggacagcaaggggctagcggcacacaggctggaacagtgtgaggtgccagagcgagaggaacaggaacagcaggcagaggtttcaaagccaacccccacccctgaaggcaccagccaggatgtgaccacagtgacactcctgctgcgagccccacctgggagcacatccagctcacctgcctcacccagcagttcacccacccctgcctctcctgagcctccattggagcctgccgaggcccagtgccttacagctgaggttccaggcagcccagagccaccccccagcccacccaagaccaccagccctgagcctcaggagtctccaacgctccccagcactgagggccagktggtcaacaagcttctgtctggccccaaagagacccctgctgcccagagccccaccaraggcccctctgacaccaagagagcagacgtggctggaccccgaccctgccaacgctccctgtcggtgctcagcccccgccaaccagcccagaaccgagagtccaccccccttgccagcggaccttcctcattccagcgggctggctctgtgcgggatcgtgtccacaagttcacatctgattctcctatggctgctaggctccaggatggcacaccccaggctgccctaagtcccctgacccccgcaaggctcctgggcccctccctcaccagcaccacccctgcctcctcctccagcggctcctcctctcggggccccagtgatacctcctcccggttcagcaaggagcaacgaggagtagcccagcccctggcccagcttcgaagctgcccccaggaggagggccccagggggcggggcttggctgctaggccccttgaaaacagagcaggggggcctgtggcacgttcagaggagcctggtgccccgctgcccgtggccgtcggcactgccgagccaggggrcagtatgaagaccacattcaccatcgagatcaaggacggccgtggccaggcctccacaggccgggtgctgctgcccacaggcaaccagagggcagaactgacactggggctgcgggygcccccgaccctactcagyaccagtagtgggggcaagagcaccatcacccgtgtcaacagccctgggaccctggctcggctgggcagtgtcactcatgtcaccagcttcagccatgccccccccagtagccgaggaggctgcagcatcaagatggaascagagccagcagagcctctcgctgcagcagtggaagnggccaatggggctgagcagacccgagtgaacaaagcaccagaagggcggagccctctgagcgctgaggagctgatgactattgaggatgaaggagtcttggacaagatgctggatcagagcacggactttgaagarcggaagctcatccgggctgcacttcgtgagctccgacaaaggaagagagaccagcgggacaaggagcgggaacggcggctgcaggaggcacggggccggccaggggaggggygcggcaacacagccactgagaccaccacgaggcacagccagcgggcagctgatggctctgctgtcagcactgttaccaagactgagcggctcgtccactccaatgatggcacacggacggcccgcaccaccacagtggagtcgagtttcgtgaggcgctcggagaatggcagtggcagcaccatgatgcaaaccaagaccttctcctcttcctcctcatccaagaagatgggcagcatcttcgaccgcgaggaccaggccagcccacgggccggcagcctggcggcgctcgagaaacggcaggccgagaagaagaaagagctgatgaaggcgcagagtctgcccaagacctcagcctcccaggcgcgcaaggccatgattgagaagctggagaaggagggcgcggccggcagccctggcggaccccgcgcagccgtgcagcgatccaccagcttcggggtccccaacgccaacagcatcaagcagatgctgctggactggtgtcgagccaagactcgcggctacgagcacgtcgacatccagaacttctcctccagctggagtgatgggatggccttctgtgccctggtgcacaacttcttccctgaggccttcgactatgggcagcttagccctcagaaccgacgccagaacttcgaggtggccttctcatctgcggagacccatgcggactgcccgcagctcctggatacagaggacatggtgcggcttcgagagcctgactggaagatgctggtggactgtgtgcccctggtggaggtggacgacatgatgatcatgggcaagaagcctgaccccaagtgtgtcttcacctatgtgcagtcgctctacaaccacctgcgacgccacgaactgcgcctgcgcggcaagaatgtctagcctgcccgcccgcatggccagccagtggcaagctgccgcccccactctccgggcaccgtytcctgcctgtgcgtccgcccaccrctgccctgtctgttgcgacaccctcccccccacatacacacgcagcgttttgataaattattggttttcaacgatcctga

SEQ ID NO: 264 - DNA, 3373 bp, Homo sapiens
  misc_feature (1)...(3373): n = A,T,C or G, or insertion/deletion polymorphism (see Tables 1-2)
agctgtggggtctgtaacaacatggcagctcccatgagaacggcatggttggagtcagaagaggaagaagcagaactgggcaggactccagaccccatcctcccaactccacccactttagtctccatggagacccaagggcggctttagggcctctggcactgaagatggaatagctttgccttgtggatctgacctcctgggactccagcgctcctaaaggcagactctcagggcttggaaggtagaagcatgctacaagaaggcaatgtctgttcaaaggtttagacaggatgagagtccatcccaggccacacagcagactggcrgccaagctggcagggctggaaccagagaccccctaccctgggtttgaattctctgagctggtgacaggtgccacaggcactggggatctcaccagaaaggaaccgacggagctagrggccagcgagatggcggacgaggccttagctgggctggatgagggagcccttcggaagctgstggaggtcacagcagatctggcagagcggcggcgcatccgctcagccatccgggaactgcagcggcaggagctggagcgcgaggaggaggccctggcatccaagcgtttccgtgccgagcggcaggacaacaaggagaactggctgcactctcagcagcgggaagctgagcagcgggctgccctggcacggctggcagggcagctggagtccatgaacgatgtggaggaattgactgcactgttgcgaagcgctggtgagtatgaggagcgcaagctgatccgagctgccatccgccgtgtacgggctcaggagattgaggctgccaccttggctgggaggttgtacagcgggcgtcccaacagtggctcaagagaggacagcaaggggctagcggcacacaggctggaacagtgtgaggtgccagagcgagaggaacaggaacagcaggcagaggtttcaaagccaacccccacccctgaaggcaccagccaggatgtgaccacagtgacactcctgctgcgagccccacctgggagcacatccagctcacctgcctcacccagcagttcacccacccctgcctctcctgagcctccattggagcctgccgaggcccagtgccttacagctgaggttccaggcagcccagagccaccccccagcccacccaagaccaccagccctgagcctcaggagtctccaacgctccccagcactgagggccagktggtcaacaagcttctgtctggccccaaagagacccctgctgcccagagccccaccaraggcccctctgacaccaagagagcagacgtggctggaccccgaccctgccaacgctccctgtcggtgctcagcccccgccaaccagcccagaaccgagagtccaccccccttgccagcggaccttcctcattccagcgggctggctctgtgcgggatcgtgtccacaagttcacatctgattctcctatggctgctaggctccaggatggcacaccccaggctgccctaagtcccctgacccccgcaaggctcctgggcccctccctcaccagcaccacccctgcctcctcctccagcggctcctcctctcggggccccagtgatacctcctcccggttcagcaaggagcaacgaggagtagcccagcccctggcccagcttcgaagctgcccccaggaggagggccccagggggcggggcttggctgctaggccccttgaaaacagagcaggggggcctgtggcacgttcagaggagcctggtgccccgctgcccgtggccgtcggcactgccgagccaggggrcagtatgaagaccacattcaccatcgagatcaaggacggccgtggccaggcctccacaggccgggtgctgctgcccacaggcaaccagagggcagaactgacactggggctgcgggygcccccgaccctactcagyaccagtagtgggggcaagagcaccatcacccgtgtcaacagccctgggaccctggctcggctgggcagtgtcactcatgtcaccagcttcagccatgccccccccagtagccgaggaggctgcagcatcaagatggaascagagccagcagagcctctcgctgcagcagtggaagnggccaatggggctgagcagacccgagtgaacaaagcaccagaagggcggagccctctgagcgctgaggagctgatgactattgaggatgaaggagtcttggacaagatgctggatcagagcacggactttgaagarcggaagctcatccgggctgcacttcgtgagctccgacaaaggaagagagaccagcgggacaaggagcgggaacggcggctgcaggaggcacggggccggccaggggaggggygcggcaacacagccactgagaccaccacgaggcacagccagcgggcagctgatggctctgctgtcagcactgttaccaagactgagcggctcgtccactccaatgatggcacacggacggcccgcaccaccacagtggagtcgagtttcgtgaggcgctcggagaatggcagtggcagcaccatgatgcaaaccaagaccttctcctcttcctcctcatccaagaagatgggcagcatcttcgaccgcgaggaccaggccagcccacgggccggcagcctggcggcgctcgagaaacggcaggccgagaagaagaaagagctgatgaaggcgcagagtctgcccaagacctcagcctcccaggcgcgcaaggccatgattgagaagctggagaaggagggcgcggccggcagccctggcggaccccgcgcagccgtgcagcgatccaccagcttcggggtccccaacgccaacagcatcaagcagatgctgctggactggtgtcgagccaagactcgcggctacgagcacgtcgacatccagaacttctcctccagctggagtgatgggatggccttctgtgccctggtgcacaacttcttccctgaggccttcgactatgggcagcttagccctcagaaccgacgccagaacttcgaggtggccttctcatctgcggagatgctggtggactgtgtgcccctggtggaggtggacgacatgatgatcatgggcaagaagcctgaccccaagtgtgtcttcacctatgtgcagtcgctctacaaccacctgcgacgccacgaactgcgcctgcgcggcaagaatgtctagcctgcccgcccgcatggccagccagtggcaagctgccgcccccactctccgggcaccgtytcctgcctgtgcgtccgcccaccrctgccctgtctgttgcgacaccctcccccccacatacacacgcagcgttttgataaattattggttttcaacgatcctga

SEQ ID NO: 265 - DNA, 3138 bp, Homo sapiens
  misc_feature (1)...(3138): n = A,T,C or G, or insertion/deletion polymorphism (see Tables 1-2)
cgcagaatccaggggacggttgctgagcgggcctgggacagcgggtcgcggcacctccsgcctgcgcgtgtctaatccgtctgtcgggtcccgaaagagctaagccgagcctgcgccggacgggtgggctggactgagagaattctctgagctggtgacaggtgccacaggcactggggatctcaccagaaaggaaccgacggagctagrggccagcgagatggcggacgaggccttagctgggctggatgagggagcccttcggaagctgstggaggtcacagcagatctggcagagcggcggcgcatccgctcagccatccgggaactgcagcggcaggagctggagcgcgaggaggaggccctggcatccaagcgtttccgtgccgagcggcaggacaacaaggagaactggctgcactctcagcagcgggaagctgagcagcgggctgccctggcacggctggcagggcagctggagtccatgaacgatgtggaggaattgactgcactgttgcgaagcgctggtgagtatgaggagcgcaagctgatccgagctgccatccgccgtgtacgggctcaggagattgaggctgccaccttggctgggaggttgtacagcgggcgtcccaacagtggctcaagagaggacagcaaggggctagcggcacacaggctggaacagtgtgaggtgccagagcgagaggaacaggaacagcaggcagaggtttcaaagccaacccccacccctgaaggcaccagccaggatgtgaccacagtgacactcctgctgcgagccccacctgggagcacatccagctcacctgcctcacccagcagttcacccacccctgcctctcctgagcctccattggagcctgccgaggcccagtgccttacagctgaggttccaggcagcccagagccaccccccagcccacccaagaccaccagccctgagcctcaggagtctccaacgctccccagcactgagggccagktggtcaacaagcttctgtctggccccaaagagacccctgctgcccagagccccaccaraggcccctctgacaccaagagagcagacgtggctggaccccgaccctgccaacgctccctgtcggtgctcagcccccgccaaccagcccagaaccgagagtccaccccccttgccagcggaccttcctcattccagcgggctggctctgtgcgggatcgtgtccacaagttcacatctgattctcctatggctgctaggctccaggatggcacaccccaggctgccctaagtcccctgacccccgcaaggctcctgggcccctccctcaccagcaccacccctgcctcctcctccagcggctcctcctctcggggccccagtgatacctcctcccggttcagcaaggagcaacgaggagtagcccagcccctggcccagcttcgaagctgcccccaggaggagggccccagggggcggggcttggctgctaggccccttgaaaacagagcaggggggcctgtggcacgttcagaggagcctggtgccccgctgcccgtggccgtcggcactgccgagccaggggrcagtatgaagaccacattcaccatcgagatcaaggacggccgtggccaggcctccacaggccgggtgctgctgcccacaggcaaccagagggcagaactgacactggggctgcgggygcccccgaccctactcagyaccagtagtgggggcaagagcaccatcacccgtgtcaacagccctgggaccctggctcggctgggcagtgtcactcatgtcaccagcttcagccatgccccccccagtagccgaggaggctgcagcatcaagatggaascagagccagcagagcctctcgctgcagcagtggaagnggccaatggggctgagcagacccgagtgaacaaagcaccagaagggcggagccctctgagcgctgaggagctgatgactattgaggatgaaggagtcttggacaagatgctggatcagagcacggactttgaagarcggaagctcatccgggctgcacttcgtgagctccgacaaaggaagagagaccagcgggacaaggagcgggaacggcggctgcaggaggcacggggccggccaggggaggggygcggcaacacagccactgagaccaccacgaggcacagccagcgggcagctgatggctctgctgtcagcactgttaccaagactgagcggctcgtccactccaatgatggcacacggacggcccgcaccaccacagtggagtcgagtttcgtgaggcgctcggagaatggcagtggcagcaccatgatgcaaaccaagaccttctcctcttcctcctcatccaagaagatgggcagcatcttcgaccgcgaggaccaggccagcccacgggccggcagcctggcggcgctcgagaaacggcaggccgagaagaagaaagagctgatgaaggcgcagagtctgcccaagacctcagcctcccaggcgcgcaaggccatgattgagaagctggagaaggagggcgcggccggcagccctggcggaccccgcgcagccgtgcagcgatccaccagcttcggggtccccaacgccaacagcatcaagcagatgctgctggactggtgtcgagccaagactcgcggctacgagcacgtcgacatccagaacttctcctccagctggagtgatgggatggccttctgtgccctggtgcacaacttcttccctgaggccttcgactatgggcagcttagccctcagaaccgacgccagaacttcgaggtggccttctcatctgcggagatgctggtggactgtgtgcccctggtggaggtggacgacatgatgatcatgggcaagaagcctgaccccaagtgtgtcttcacctatgtgcagtcgctctacaaccacctgcgacgccacgaactgcgcctgcgcggcaagaatgtctagcctgcccgcccgcatggccagccagtggcaagctgccgcccccactctccgggcaccgtytcctgcctgtgcgtccgcccaccrctgccctgtctgttgcgacaccctcccccccacatacacacgcagcgttttgataaattattggttttcaacgatcctga

SEQ ID NO: 266 - DNA, 3303 bp, Homo sapiens
  misc_feature (1)...(3303): n = A,T,C or G, or insertion/deletion polymorphism (see Tables 1-2)
cgcagaatccaggggacggttgctgagcgggcctgggacagcgggtcgcggcacctccsgcctgcgcgtgtctaatccgtctgtcgggtcccgaaagagctaagccgagcctgcgccggacgggtgggctggactgagagaattctctgagctggtgacaggtgccacaggcactggggatctcaccagaaaggaaccgacggagctagrggccagcgagatggcggacgaggccttagctgggctggatgagggagcccttcggaagctgstggaggtcacagcagatctggcagagcggcggcgcatccgctcagccatccgggaactgcagcggcaggagctggagcgcgaggaggaggccctggcatccaagcgtttccgtgccgagcggcaggacaacaaggagaactggctgcactctcagcagcgggaagctgagcagcgggctgccctggcacggctggcagggcagctggagtccatgaacgatgtggaggaattgactgcactgttgcgaagcgctggtgagtatgaggagcgcaagctgatccgagctgccatccgccgtgtacgggctcaggagattgaggctgccaccttggctgggaggttgtacagcgggcgtcccaacagtggctcaagagaggacagcaaggggctagcggcacacaggctggaacagtgtgaggtgccagagcgagaggaacaggaacagcaggcagaggtttcaaagccaacccccacccctgaaggcaccagccaggatgtgaccacagtgacactcctgctgcgagccccacctgggagcacatccagctcacctgcctcacccagcagttcacccacccctgcctctcctgagcctccattggagcctgccgaggcccagtgccttacagctgaggttccaggcagcccagagccaccccccagcccacccaagaccaccagccctgagcctcaggagtctccaacgctccccagcactgagggccagktggtcaacaagcttctgtctggccccaaagagacccctgctgcccagagccccaccaraggcccctctgacaccaagagagcagacgtggctggaccccgaccctgccaacgctccctgtcggtgctcagcccccgccaaccagcccagaaccgagagtccaccccccttgccagcggaccttcctcattccagcgggctggctctgtgcgggatcgtgtccacaagttcacatctgattctcctatggctgctaggctccaggatggcacaccccaggctgccctaagtcccctgacccccgcaaggctcctgggcccctccctcaccagcaccacccctgcctcctcctccagcggctcctcctctcggggccccagtgatacctcctcccggttcagcaaggagcaacgaggagtagcccagcccctggcccagcttcgaagctgcccccaggaggagggccccagggggcggggcttggctgctaggccccttgaaaacagagcaggggggcctgtggcacgttcagaggagcctggtgccccgctgcccgtggccgtcggcactgccgagccaggggrcagtatgaagaccacattcaccatcgagatcaaggacggccgtggccaggcctccacaggccgggtgctgctgcccacaggcaaccagagggcagaactgacactggggctgcgggygcccccgaccctactcagyaccagtagtgggggcaagagcaccatcacccgtgtcaacagccctgggaccctggctcggctgggcagtgtcactcatgtcaccagcttcagccatgccccccccagtagccgaggaggctgcagcatcaagatggaascagagccagcagagcctctcgctgcagcagtggaagnggccaatggggctgagcagacccgagtgaacaaagcaccagaagggcggagccctctgagcgctgaggagctgatgactattgaggatgaaggagtcttggacaagatgctggatcagagcacggactttgaagarcggaagctcatccgggctgcacttcgtgagctccgacaaaggaagagagaccagcgggacaaggagcgggaacggcggctgcaggaggcacggggccggccaggggaggggygcggcaacacagccactgagaccaccacgaggcacagccagcgggcagctgatggctctgctgtcagcactgttaccaagactgagcggctcgtccactccaatgatggcacacggacggcccgcaccaccacagtggagtcgagtttcgtgaggcgctcggagaatggcagtggcagcaccatgatgcaaaccaagaccttctcctcttcctcctcatccaagaagatgggcagcatcttcgaccgcgaggaccaggccagcccacgggccggcagcctggcggcgctcgagaaacggcaggccgagaagaagaaagagctgatgaaggcgcagagtctgcccaagacctcagcctcccaggcgcgcaaggccatgattgagaagctggagaaggagggcgcggccggcagccctggcggaccccgcgcagccgtgcagcgatccaccagcttcggggtccccaacgccaacagcatcaagcagatgctgctggactggtgtcgagccaagactcgcggctacgagcacgtcgacatccagaacttctcctccagctggagtgatgggatggccttctgtgccctggtgcacaacttcttccctgaggccttcgactatgggcagcttagccctcagaaccgacgccagaacttcgaggtggccttctcatctgcggagacccatgcggactgcccgcagctcctggatacagaggacatggtgcggcttcgagagcctgactggaagtgcgtgtacacgtacatccaggaattctaccgctgtctggtccagaaggggctggtaaaaaccaaaaagtcctaacccctgctcggggccccacggatgctggtggactgtgtgcccctggtggaggtggacgacatgatgatcatgggcaagaagcctgaccccaagtgtgtcttcacctatgtgcagtcgctctacaaccacctgcgacgccacgaactgcgcctgcgcggcaagaatgtctagcctgcccgcccgcatggccagccagtggcaagctgccgcccccactctccgggcaccgtytcctgcctgtgcgtccgcccaccrctgccctgtctgttgcgacaccctcccccccacatacacacgcagcgttttgataaattattggttttcaacgatcctga

SEQ ID NO: 267 - DNA, 3538 bp, Homo sapiens
  misc_feature (1)...(3538): n = A,T,C or G, or insertion/deletion polymorphism (see Tables 1-2)
agctgtggggtctgtaacaacatggcagctcccatgagaacggcatggttggagtcagaagaggaagaagcagaactgggcaggactccagaccccatcctcccaactccacccactttagtctccatggagacccaagggcggctttagggcctctggcactgaagatggaatagctttgccttgtggatctgacctcctgggactccagcgctcctaaaggcagactctcagggcttggaaggtagaagcatgctacaagaaggcaatgtctgttcaaaggtttagacaggatgagagtccatcccaggccacacagcagactggcrgccaagctggcagggctggaaccagagaccccctaccctgggtttgaattctctgagctggtgacaggtgccacaggcactggggatctcaccagaaaggaaccgacggagctagrggccagcgagatggcggacgaggccttagctgggctggatgagggagcccttcggaagctgstggaggtcacagcagatctggcagagcggcggcgcatccgctcagccatccgggaactgcagcggcaggagctggagcgcgaggaggaggccctggcatccaagcgtttccgtgccgagcggcaggacaacaaggagaactggctgcactctcagcagcgggaagctgagcagcgggctgccctggcacggctggcagggcagctggagtccatgaacgatgtggaggaattgactgcactgttgcgaagcgctggtgagtatgaggagcgcaagctgatccgagctgccatccgccgtgtacgggctcaggagattgaggctgccaccttggctgggaggttgtacagcgggcgtcccaacagtggctcaagagaggacagcaaggggctagcggcacacaggctggaacagtgtgaggtgccagagcgagaggaacaggaacagcaggcagaggtttcaaagccaacccccacccctgaaggcaccagccaggatgtgaccacagtgacactcctgctgcgagccccacctgggagcacatccagctcacctgcctcacccagcagttcacccacccctgcctctcctgagcctccattggagcctgccgaggcccagtgccttacagctgaggttccaggcagcccagagccaccccccagcccacccaagaccaccagccctgagcctcaggagtctccaacgctccccagcactgagggccagktggtcaacaagcttctgtctggccccaaagagacccctgctgcccagagccccaccaraggcccctctgacaccaagagagcagacgtggctggaccccgaccctgccaacgctccctgtcggtgctcagcccccgccaaccagcccagaaccgagagtccaccccccttgccagcggaccttcctcattccagcgggctggctctgtgcgggatcgtgtccacaagttcacatctgattctcctatggctgctaggctccaggatggcacaccccaggctgccctaagtcccctgacccccgcaaggctcctgggcccctccctcaccagcaccacccctgcctcctcctccagcggctcctcctctcggggccccagtgatacctcctcccggttcagcaaggagcaacgaggagtagcccagcccctggcccagcttcgaagctgcccccaggaggagggccccagggggcggggcttggctgctaggccccttgaaaacagagcaggggggcctgtggcacgttcagaggagcctggtgccccgctgcccgtggccgtcggcactgccgagccaggggrcagtatgaagaccacattcaccatcgagatcaaggacggccgtggccaggcctccacaggccgggtgctgctgcccacaggcaaccagagggcagaactgacactggggctgcgggygcccccgaccctactcagyaccagtagtgggggcaagagcaccatcacccgtgtcaacagccctgggaccctggctcggctgggcagtgtcactcatgtcaccagcttcagccatgccccccccagtagccgaggaggctgcagcatcaagatggaascagagccagcagagcctctcgctgcagcagtggaagnggccaatggggctgagcagacccgagtgaacaaagcaccagaagggcggagccctctgagcgctgaggagctgatgactattgaggatgaaggagtcttggacaagatgctggatcagagcacggactttgaagarcggaagctcatccgggctgcacttcgtgagctccgacaaaggaagagagaccagcgggacaaggagcgggaacggcggctgcaggaggcacggggccggccaggggaggggygcggcaacacagccactgagaccaccacgaggcacagccagcgggcagctgatggctctgctgtcagcactgttaccaagactgagcggctcgtccactccaatgatggcacacggacggcccgcaccaccacagtggagtcgagtttcgtgaggcgctcggagaatggcagtggcagcaccatgatgcaaaccaagaccttctcctcttcctcctcatccaagaagatgggcagcatcttcgaccgcgaggaccaggccagcccacgggccggcagcctggcggcgctcgagaaacggcaggccgagaagaagaaagagctgatgaaggcgcagagtctgcccaagacctcagcctcccaggcgcgcaaggccatgattgagaagctggagaaggagggcgcggccggcagccctggcggaccccgcgcagccgtgcagcgatccaccagcttcggggtccccaacgccaacagcatcaagcagatgctgctggactggtgtcgagccaagactcgcggctacgagcacgtcgacatccagaacttctcctccagctggagtgatgggatggccttctgtgccctggtgcacaacttcttccctgaggccttcgactatgggcagcttagccctcagaaccgacgccagaacttcgaggtggccttctcatctgcggagacccatgcggactgcccgcagctcctggatacagaggacatggtgcggcttcgagagcctgactggaagtgcgtgtacacgtacatccaggaattctaccgctgtctggtccagaaggggctggtaaaaaccaaaaagtcctaacccctgctcggggccccacggatgctggtggactgtgtgcccctggtggaggtggacgacatgatgatcatgggcaagaagcctgaccccaagtgtgtcttcacctatgtgcagtcgctctacaaccacctgcgacgccacgaactgcgcctgcgcggcaagaatgtctagcctgcccgcccgcatggccagccagtggcaagctgccgcccccactctccgggcaccgtytcctgcctgtgcgtccgcccaccrctgccctgtctgttgcgacaccctcccccccacatacacacgcagcgttttgataaattattggttttcaacgatcctga

SEQ ID NO: 268 - DNA, 3207 bp, Homo sapiens
  misc_feature (1)...(3207): n = A,T,C or G, or insertion/deletion polymorphism (see Tables 1-2)
cgcagaatccaggggacggttgctgagcgggcctgggacagcgggtcgcggcacctccsgcctgcgcgtgtctaatccgtctgtcgggtcccgaaagagctaagccgagcctgcgccggacgggtgggctggactgagagaattctctgagctggtgacaggtgccacaggcactggggatctcaccagaaaggaaccgacggagctagrggccagcgagatggcggacgaggccttagctgggctggatgagggagcccttcggaagctgstggaggtcacagcagatctggcagagcggcggcgcatccgctcagccatccgggaactgcagcggcaggagctggagcgcgaggaggaggccctggcatccaagcgtttccgtgccgagcggcaggacaacaaggagaactggctgcactctcagcagcgggaagctgagcagcgggctgccctggcacggctggcagggcagctggagtccatgaacgatgtggaggaattgactgcactgttgcgaagcgctggtgagtatgaggagcgcaagctgatccgagctgccatccgccgtgtacgggctcaggagattgaggctgccaccttggctgggaggttgtacagcgggcgtcccaacagtggctcaagagaggacagcaaggggctagcggcacacaggctggaacagtgtgaggtgccagagcgagaggaacaggaacagcaggcagaggtttcaaagccaacccccacccctgaaggcaccagccaggatgtgaccacagtgacactcctgctgcgagccccacctgggagcacatccagctcacctgcctcacccagcagttcacccacccctgcctctcctgagcctccattggagcctgccgaggcccagtgccttacagctgaggttccaggcagcccagagccaccccccagcccacccaagaccaccagccctgagcctcaggagtctccaacgctccccagcactgagggccagktggtcaacaagcttctgtctggccccaaagagacccctgctgcccagagccccaccaraggcccctctgacaccaagagagcagacgtggctggaccccgaccctgccaacgctccctgtcggtgctcagcccccgccaaccagcccagaaccgagagtccaccccccttgccagcggaccttcctcattccagcgggctggctctgtgcgggatcgtgtccacaagttcacatctgattctcctatggctgctaggctccaggatggcacaccccaggctgccctaagtcccctgacccccgcaaggctcctgggcccctccctcaccagcaccacccctgcctcctcctccagcggctcctcctctcggggccccagtgatacctcctcccggttcagcaaggagcaacgaggagtagcccagcccctggcccagcttcgaagctgcccccaggaggagggccccagggggcggggcttggctgctaggccccttgaaaacagagcaggggggcctgtggcacgttcagaggagcctggtgccccgctgcccgtggccgtcggcactgccgagccaggggrcagtatgaagaccacattcaccatcgagatcaaggacggccgtggccaggcctccacaggccgggtgctgctgcccacaggcaaccagagggcagaactgacactggggctgcgggygcccccgaccctactcagyaccagtagtgggggcaagagcaccatcacccgtgtcaacagccctgggaccctggctcggctgggcagtgtcactcatgtcaccagcttcagccatgccccccccagtagccgaggaggctgcagcatcaagatggaascagagccagcagagcctctcgctgcagcagtggaagnggccaatggggctgagcagacccgagtgaacaaagcaccagaagggcggagccctctgagcgctgaggagctgatgactattgaggatgaaggagtcttggacaagatgctggatcagagcacggactttgaagarcggaagctcatccgggctgcacttcgtgagctccgacaaaggaagagagaccagcgggacaaggagcgggaacggcggctgcaggaggcacggggccggccaggggaggggygcggcaacacagccactgagaccaccacgaggcacagccagcgggcagctgatggctctgctgtcagcactgttaccaagactgagcggctcgtccactccaatgatggcacacggacggcccgcaccaccacagtggagtcgagtttcgtgaggcgctcggagaatggcagtggcagcaccatgatgcaaaccaagaccttctcctcttcctcctcatccaagaagatgggcagcatcttcgaccgcgaggaccaggccagcccacgggccggcagcctggcggcgctcgagaaacggcaggccgagaagaagaaagagctgatgaaggcgcagagtctgcccaagacctcagcctcccaggcgcgcaaggccatgattgagaagctggagaaggagggcgcggccggcagccctggcggaccccgcgcagccgtgcagcgatccaccagcttcggggtccccaacgccaacagcatcaagcagatgctgctggactggtgtcgagccaagactcgcggctacgagcacgtcgacatccagaacttctcctccagctggagtgatgggatggccttctgtgccctggtgcacaacttcttccctgaggccttcgactatgggcagcttagccctcagaaccgacgccagaacttcgaggtggccttctcatctgcggagacccatgcggactgcccgcagctcctggatacagaggacatggtgcggcttcgagagcctgactggaagatgctggtggactgtgtgcccctggtggaggtggacgacatgatgatcatgggcaagaagcctgaccccaagtgtgtcttcacctatgtgcagtcgctctacaaccacctgcgacgccacgaactgcgcctgcgcggcaagaatgtctagcctgcccgcccgcatggccagccagtggcaagctgccgcccccactctccgggcaccgtytcctgcctgtgcgtccgcccaccrctgccctgtctgttgcgacaccctcccccccacatacacacgcagcgttttgataaattattggttttcaacgatcctga

SEQ ID NO: 269 - DNA, 2296 bp, Homo sapiens
atgggactgggccaagggtggggctgggaagcatcctgttttgcatgtttgatcaggagctgctgccaagttgtgactttcactttcccttttgggttccagggtatatctcagagmctggagaacgtgtctggttattatgcagatgcacggctggaggtgggatccacayagctcagaacagctggatcttgctcacactctttcaagagaagcttccttggacaaaaggaccctgccttggtgtgagagtgagggcagagggagctggagcaagtagaatttctctaaataccagctggctggggcccaggagattaaaaaacaccgggctagggttaagaaaaaaaacgaacccttccagtcaggtcagtgactggagagctccawggaaagtctctcagtgacctggctgctggcaccatggactcagaaaagaaacgctttactgaagaggccaccaaatacttccgggagagagtcagcccagtgcatctgcaaatcctgctgactaacaatgaagcctggaagagattygtgactgcggctgaattgcccagggatgaggcagatgctctctacgaagctctgaagaagcttagaacatatgcagctattgaggacgaatatgtgcagcagaaagatgagcagtttagggaatggtttttgaaagagtttccccaagtcaagaggaagatccaggagtccatagaaaagcttcgtgcccttgcaaatggtattgaagaggtccacagaggctgcaccatctccaaygtggtgtccagctccactggcgctgcctctggcatcatgtcccttgctggtcttgttttggcaccatttacagcagggacgagtctggcccttactgcagctggggtagggctgggagcagcgtctgctrtgactgggatcaccaccagcatcgtggagcactcatayacatcatcagcagaagctgaagccagcaggctgactgcaaccagcattgaccgmttgaaggtatttaaggaagttatgcgtgacatcacacccaacttactttcccttcttaataattattacgaagccacacaaaccattgggagtgaaatccgtgccatcaggcaagccagagccagggcccgactccctgtgaccacctggcgaatctcagctggaagtggwggtcaagcagagagaacgattgcaggcaccacccgggcagtgagcagaggagcccggatcctgagtgcgaccacttcaggcatcttccttgcactggatgtggtcaaccttgtatacgagtcaaagcacttgcatgagggggcaaagtctgcatctgctgaggagctgaggcggcaggctcaggagctggaggagaatctaatggagctcactcagatctatcagcgtctgaatccatgccatacccactgaccccagaccagtgcagccagcaggggaggtgagccatacacaggccacgacaaaatgcaggcattttattagggggataaagagggcaaggtaaagtttatggagctgagtgttagtgactttggcatttctgtagctgagcacagcaggggaggggttaatgcagatggcaagtgcaccaaggagaaggcaggaatgctggagcctggaataagggargagaggggactggagagtgtggggaataggaagaagaaatttcctttagactaacgaatatattggggggaggaatagaggggaggtgtgcaggaaccagcaatgagaaggccaggaaaagaaagagctgaaaatgcagaaagccgaagagttagaacttttggatacagcagaagaaacagcggctccactaccgacctgcccccggttcgatgtccttccaagaatgaagtctttccctggtgatggtcccctgccctgtctttccagcatccactctgtcttgtcctcctggaagtgtatctcagtcagccagtggcttcttgatgatggcggtggaggtggtggttgtagtgtgatggatcccctttaggttatttaggggtatatgtcccctgcttgaaccctgaaggccaggtaatgagccatggccattgtccccagctgaggaccaggtgtctctaaaaacccaaacatcctggagagtatgcgagaacctaccaagaaaaacagtctcattactcatatacagcaggcaaagagacagaaaattaactgaaaagcagtttagagactgggggaggccggatctctagagccatcctgctgagtgccctgtgtgtaagtcctaataaactcacctactcaccaagctgga

SEQ ID NO: 270 - DNA, 2183 bp, Homo sapiens
atgggactgggccaagggtggggctgggaagcatcctgttttgcatgtttgatcaggagctgctgccaagttgtgactttcactttcccttttgggttccagggtatatctcagagmctggagaacgtgtctggttattatgcagatgcacggctggaggtgggatccacayagctcagaacagctggatcttgctcacactctttcaagagaagcttccttgggttaagaaaaaaaacgaacccttccagtcaggtcagtgactggagagctccawggaaagtctctcagtgacctggctgctggcaccatggactcagaaaagaaacgctttactgaagaggccaccaaatacttccgggagagagtcagcccagtgcatctgcaaatcctgctgactaacaatgaagcctggaagagattygtgactgcggctgaattgcccagggatgaggcagatgctctctacgaagctctgaagaagcttagaacatatgcagctattgaggacgaatatgtgcagcagaaagatgagcagtttagggaatggtttttgaaagagtttccccaagtcaagaggaagatccaggagtccatagaaaagcttcgtgcccttgcaaatggtattgaagaggtccacagaggctgcaccatctccaaygtggtgtccagctccactggcgctgcctctggcatcatgtcccttgctggtcttgttttggcaccatttacagcagggacgagtctggcccttactgcagctggggtagggctgggagcagcgtctgctrtgactgggatcaccaccagcatcgtggagcactcatayacatcatcagcagaagctgaagccagcaggctgactgcaaccagcattgaccgmttgaaggtatttaaggaagttatgcgtgacatcacacccaacttactttcccttcttaataattattacgaagccacacaaaccattgggagtgaaatccgtgccatcaggcaagccagagccagggcccgactccctgtgaccacctggcgaatctcagctggaagtggwggtcaagcagagagaacgattgcaggcaccacccgggcagtgagcagaggagcccggatcctgagtgcgaccacttcaggcatcttccttgcactggatgtggtcaaccttgtatacgagtcaaagcacttgcatgagggggcaaagtctgcatctgctgaggagctgaggcggcaggctcaggagctggaggagaatctaatggagctcactcagatctatcagcgtctgaatccatgccatacccactgaccccagaccagtgcagccagcaggggaggtgagccatacacaggccacgacaaaatgcaggcattttattagggggataaagagggcaaggtaaagtttatggagctgagtgttagtgactttggcatttctgtagctgagcacagcaggggaggggttaatgcagatggcaagtgcaccaaggagaaggcaggaatgctggagcctggaataagggargagaggggactggagagtgtggggaataggaagaagaaatttcctttagactaacgaatatattggggggaggaatagaggggaggtgtgcaggaaccagcaatgagaaggccaggaaaagaaagagctgaaaatgcagaaagccgaagagttagaacttttggatacagcagaagaaacagcggctccactaccgacctgcccccggttcgatgtccttccaagaatgaagtctttccctggtgatggtcccctgccctgtctttccagcatccactctgtcttgtcctcctggaagtgtatctcagtcagccagtggcttcttgatgatggcggtggaggtggtggttgtagtgtgatggatcccctttaggttatttaggggtatatgtcccctgcttgaaccctgaaggccaggtaatgagccatggccattgtccccagctgaggaccaggtgtctctaaaaacccaaacatcctggagagtatgcgagaacctaccaagaaaaacagtctcattactcatatacagcaggcaaagagacagaaaattaactgaaaagcagtttagagactgggggaggccggatctctagagccatcctgctgagtgccctgtgtgtaagtcctaataaactcacctactcaccaagctgga

SEQ ID NO: 271 - DNA, 2086 bp, Homo sapiens
atgggactgggccaagggtggggctgggaagcatcctgttttgcatgtttgatcaggagctgctgccaagttgtgactttcactttcccttttgggttccagggtatatctcagagmctggagaacgtgtctggttattatgcagatgcacggctggaggtgggatccacayagctcagaacagctggatcttgctcacactctttcaagagaagcttccttgaaaagaaacgctttactgaagaggccaccaaatacttccgggagagagtcagcccagtgcatctgcaaatcctgctgactaacaatgaagcctggaagagattygtgactgcggctgaattgcccagggatgaggcagatgctctctacgaagctctgaagaagcttagaacatatgcagctattgaggacgaatatgtgcagcagaaagatgagcagtttagggaatggtttttgaaagagtttccccaagtcaagaggaagatccaggagtccatagaaaagcttcgtgcccttgcaaatggtattgaagaggtccacagaggctgcaccatctccaaygtggtgtccagctccactggcgctgcctctggcatcatgtcccttgctggtcttgttttggcaccatttacagcagggacgagtctggcccttactgcagctggggtagggctgggagcagcgtctgctrtgactgggatcaccaccagcatcgtggagcactcatayacatcatcagcagaagctgaagccagcaggctgactgcaaccagcattgaccgmttgaaggtatttaaggaagttatgcgtgacatcacacccaacttactttcccttcttaataattattacgaagccacacaaaccattgggagtgaaatccgtgccatcaggcaagccagagccagggcccgactccctgtgaccacctggcgaatctcagctggaagtggwggtcaagcagagagaacgattgcaggcaccacccgggcagtgagcagaggagcccggatcctgagtgcgaccacttcaggcatcttccttgcactggatgtggtcaaccttgtatacgagtcaaagcacttgcatgagggggcaaagtctgcatctgctgaggagctgaggcggcaggctcaggagctggaggagaatctaatggagctcactcagatctatcagcgtctgaatccatgccatacccactgaccccagaccagtgcagccagcaggggaggtgagccatacacaggccacgacaaaatgcaggcattttattagggggataaagagggcaaggtaaagtttatggagctgagtgttagtgactttggcatttctgtagctgagcacagcaggggaggggttaatgcagatggcaagtgcaccaaggagaaggcaggaatgctggagcctggaataagggargagaggggactggagagtgtggggaataggaagaagaaatttcctttagactaacgaatatattggggggaggaatagaggggaggtgtgcaggaaccagcaatgagaaggccaggaaaagaaagagctgaaaatgcagaaagccgaagagttagaacttttggatacagcagaagaaacagcggctccactaccgacctgcccccggttcgatgtccttccaagaatgaagtctttccctggtgatggtcccctgccctgtctttccagcatccactctgtcttgtcctcctggaagtgtatctcagtcagccagtggcttcttgatgatggcggtggaggtggtggttgtagtgtgatggatcccctttaggttatttaggggtatatgtcccctgcttgaaccctgaaggccaggtaatgagccatggccattgtccccagctgaggaccaggtgtctctaaaaacccaaacatcctggagagtatgcgagaacctaccaagaaaaacagtctcattactcatatacagcaggcaaagagacagaaaattaactgaaaagcagtttagagactgggggaggccggatctctagagccatcctgctgagtgccctgtgtgtaagtcctaataaactcacctactcaccaagctgga

SEQ ID NO: 272 - DNA, 2412 bp, Homo sapiens
atgggactgggccaagggtggggctgggaagcatcctgttttgcatgtttgatcaggagctgctgccaagttgtgactttcactttcccttttgggttccagggtatatctcagagmctggagaacgtgtctggttattatgcagatgcacggctggaggtgggatccacayagctcagaacagctggatcttgctcacactctttcaagagaagcttccttggacaaaaggaccctgccttggtgtgagagtgagggcagagggagctggagcaagtagaatttctctaaataccagctggctggggcccaggagattaaaaaacaccgggctaggttggtcttggcatttgctgacacgcaaagggattgcagagatccagcccctccaacctccctctgtccacaggtggctcacattcagtcccacaatttgctttctcctcctcaagggttaagaaaaaaaacgaacccttccagtcaggtcagtgactggagagctccawggaaagtctctcagtgacctggctgctggcaccatggactcagaaaagaaacgctttactgaagaggccaccaaatacttccgggagagagtcagcccagtgcatctgcaaatcctgctgactaacaatgaagcctggaagagattygtgactgcggctgaattgcccagggatgaggcagatgctctctacgaagctctgaagaagcttagaacatatgcagctattgaggacgaatatgtgcagcagaaagatgagcagtttagggaatggtttttgaaagagtttccccaagtcaagaggaagatccaggagtccatagaaaagcttcgtgcccttgcaaatggtattgaagaggtccacagaggctgcaccatctccaaygtggtgtccagctccactggcgctgcctctggcatcatgtcccttgctggtcttgttttggcaccatttacagcagggacgagtctggcccttactgcagctggggtagggctgggagcagcgtctgctrtgactgggatcaccaccagcatcgtggagcactcatayacatcatcagcagaagctgaagccagcaggctgactgcaaccagcattgaccgmttgaaggtatttaaggaagttatgcgtgacatcacacccaacttactttcccttcttaataattattacgaagccacacaaaccattgggagtgaaatccgtgccatcaggcaagccagagccagggcccgactccctgtgaccacctggcgaatctcagctggaagtggwggtcaagcagagagaacgattgcaggcaccacccgggcagtgagcagaggagcccggatcctgagtgcgaccacttcaggcatcttccttgcactggatgtggtcaaccttgtatacgagtcaaagcacttgcatgagggggcaaagtctgcatctgctgaggagctgaggcggcaggctcaggagctggaggagaatctaatggagctcactcagatctatcagcgtctgaatccatgccatacccactgaccccagaccagtgcagccagcaggggaggtgagccatacacaggccacgacaaaatgcaggcattttattagggggataaagagggcaaggtaaagtttatggagctgagtgttagtgactttggcatttctgtagctgagcacagcaggggaggggttaatgcagatggcaagtgcaccaaggagaaggcaggaatgctggagcctggaataagggargagaggggactggagagtgtggggaataggaagaagaaatttcctttagactaacgaatatattggggggaggaatagaggggaggtgtgcaggaaccagcaatgagaaggccaggaaaagaaagagctgaaaatgcagaaagccgaagagttagaacttttggatacagcagaagaaacagcggctccactaccgacctgcccccggttcgatgtccttccaagaatgaagtctttccctggtgatggtcccctgccctgtctttccagcatccactctgtcttgtcctcctggaagtgtatctcagtcagccagtggcttcttgatgatggcggtggaggtggtggttgtagtgtgatggatcccctttaggttatttaggggtatatgtcccctgcttgaaccctgaaggccaggtaatgagccatggccattgtccccagctgaggaccaggtgtctctaaaaacccaaacatcctggagagtatgcgagaacctaccaagaaaaacagtctcattactcatatacagcaggcaaagagacagaaaattaactgaaaagcagtttagagactgggggaggccggatctctagagccatcctgctgagtgccctgtgtgtaagtcctaataaactcacctactcaccaagctgga

SEQ ID NO: 273 - DNA, 5051 bp, Homo sapiens
cggcgcccgggcgcaacgcaaacatggcggcgggtggcacccgtcggtgaggcggtgccgggcgggggttgtcgggtgtcatgggcggtggcgacggcaccgcccccgcgtctccctgagcgggacggcagggggggcttctgcgctgagccgggcgatggacgacagcggcgagctgggtggtctggagaccatggagaccctcacggagctgggcgacgagctgaccctgggagacatcgacgagatgctgcaatttgtcagtaatcaagtgggagagttccctgacttgttttcagaacagctgtgtagctcctttcctggcagtggtggtagtggtagcagcagcggcagcagtggcagcagcagcagcagcagcaatggcaggggcmgcagcagcggagctgtggacccttcagtgcaacggtcattcacccaggtcacattaccttccttctctccctcggcggcctccccacaggctccaactctgcaagtcaaggtttctcccacctcagttccmaccacacccagggcaactcctattcttcagccccgcccccagccccagcctcaacctcaaactcagctgcaacaacagacggtaatgatcacgccaacattcagcaccactccgcagacgaggatcatccagcagcctttgatataccagaatgcagctactagctttcaagtccttcagcctcaagtccaaagcctggtgacatcctcccaggtacagccggtcaccattcagcagcaggtgcagacagtacaggcccagcgggtgctgacacaaacggccaatggcacgctgcagacccttgccccggctacggtgcagacagttgctgcrccacaggtgcagcaggtcccggtcctggtccagcctcagatcatcaagacagattcccttgttttgaccacactgaagacagatggcagccctgttatggctgcggtccagaacccggccctcacygccctcaccacccctatccagacggctgcccttcaagtaccaaccctggtgggcagcagtgggaccattctgaccacaatgcctgtaatgatggggcaagagaaagtgcccattaagcaggtacctgggggagtcaagcagcttgagccccccaaagaaggagaaaggcggacaacccataatatcattgagaaacgatatcgctcctccatcaatgacaaaatcatcgaattgaaagacctggtcatggggacagacgccaagatgcacaagtctggcgttctgaggaaggccattgattacatcaaatacttgcagcaggtcaatcataaactgcgccaggagaacatggtgctgaagctggcaaatcaaaagaacaagcttctaaagggcatcgacctaggcagtctggtggacaatgaggtggacctgaagatcgaggactttaatcagaatgtccttctgatgtcccccccagcctctgactcagggtcccaggctggcttctctccctactccattgactctgagccaggaagccctctattggatgatgcaaaggtcaaagatgagccagactctcctcctgtggcgctgggcatggtagaccgctcacggattcttctgtgtgtcctcaccttcctgtgcctctcctttaaccccctgacttccctgctgcagtggggaggggcccacgactctgaccagcacccacactcaggctctggccgcagtgtcctgtcattcgagtcaggttctgggggctggtttgactggatgatgcctactcttctcttatggctggtaaatggtgtgattgtcctgagcgtctttgtgaagctkctggttcatggggagccagtgatccggccacactcgcgctcctcggtcaccttctggaggcaccggaaacaggcagatctggatctcgccagaggagattttgcagctgctgccgscaacctacaaacctgcctggcagttttgggccgggcactgcccacctcccgcctggacctggcctgcagcctctcctggaacrtgatccgctacagcctgcagaagctacgcctggtgcgctggctgctcaagaaagtcttccagtgccrgcgggccacgccagccactgaggcaggctttgaagacgaagctaagaccagcgcccgggatgcggctctggcctatcaccggctgcaccagctgcacatcacagggaagcttcctgcaggatccgcctgttccgatgtacacatggcgttgtgtgccgtgaacctggctgaatgtgcagaggagaagatcccaccgagcacactggttgagatccatctgactgctgccatggggctcaagacccggtgtggaggcaagctgggcttcctggccagctacttcctcagccgagcccagagcctgtgtggccccgagcacagtgctgttcctgactccctgcgctggctctgccaccccctgggccagaagtttttcatggagcggagctggtctgtgaagtcagctgccaaggagagtctatactgtgcccagaggaacccagctgaccccattgcgcaggtccaccaggccttctgcaagaacctgctggagcgagctatagagtccttggtgaaacctcaggccaagaagaaggctggagaccaggaagaagagagctgtgaattctccagtgctctggagtacttgaaattacttcattcttttgtggactctgtgggggttatgagccccccactctccagsagctccgtgctcaagtccgccctgggtccagacatcatctgtcggtggtggacgtctgcaatcactgtggccatcagctggctccagggagacgatgcagctgtgcgctctcattttaccaaagtggaacgcatccccaaggccctggaagtgacagagagccccctggtgaaggccatcttccatgcctgcagagccatgcatgcctcactccctgggaaagcagatgggcagcagagttccttctgccattgcgagagggccagtggccacctatggagcagcctcaacgtcagtggggccacctctgaccctgccctcaaccacgtggtccagctgctcacctgtgacctgctactgtcgctacggacagcgctctggcaaaaacaggccagtgccagccaggctgtgggggagacctaccacgcgtcaggcgctgaactggcgggcttccaacgggacctgggcagcctgcgcaggctggcacacagcttccgcccagcataccgcaaggtgttcctgcatgaagccaccgtgcgcctgatggcaggagccagccccacccgcacccaccagctgctggaacacagcctgmggcggcgcaccacgcagagcaccaagcacggagaggtggatgcctggcccggccagcgagagcgggccaccgccatcctgctggcctgccgccacctgcccctctccttcctctcctccccgggccagcgggcagtgctgctggccgaagctgcccgcaccctggagaaggtgggcgaccggcgctcctgcaacgactgccagcagatgattgttaagctgggtggtggcactgccattgccgcctcctgaccaccaggctcagcccacccctccacctctctctcgatttctctctcyccccctcagcatcttcccgctgagagtggtggggargagccttgtcttcttagctgtcacctgccgaggcttctgggccactcaggccagtgcacccctgggcagagccccttaaagctgctgtcactagatgcccatggtccagggcctggtgggcgtgagaggataggtggcagggcagaaactgggcagccctgacttgatagcagcagggggagctcccaagctgcyaagcccctgcctccagccttcctgagtttctctctcctgaaccctactctctcctttttgcttcctcagtttttatcaggctttctctgggggacagcagtctctgagcaccagggagcagttgccctcaggcctgtgcccagcatgccctcccctttttatacgaatgttttctaccagtgtgcttgggtttgccatgatgcgaggctgagttgctgtagcgtcttgattctctccctgggtctgcgttccctcccctgggcctgactgagcctgctcattgtttttccctttattacacaggacagccaggggaggaggggggcccagccctgggaggctggtgggaggcagggggcaggcctgcggatgcatgaaataatgttggcattattttttaattttttaaaaagatgttagcccaagctcagggtaggcccagggggctgggagaaatgaagccacccatggggactggggaccaggggccttcagcatggcttctaggttccctcctccccctaccccatctcctacctccacagtacagactgtccccaacttaacagtggttcaacttaaaccatgtttcaactttacaattggtctgttggggtattaaatgaatttgtgacttaggatattttcatttatgatgggtttatcargaagtaaccccatggtaagttgaggcatatctgtatatatttaaacctaattaattcttgagctgaaaataaataaaccaggatggcagggaccaacccctaatccctccccagcggcaagcccctcttttcagagtgggcagagggttgcctatggtgggcactaggaatgaggtcccctgcctcgatgcgggtcctaggagaaaaagtcctacttttctgggtccccaggtgctcacagcagggccaccttgatgcaggctggaatgttatccctggggtgtgcttggaccccacctgctttctttctctcctgcccctcccctactctcactgtaatttatggaccctgcccgcctgcgtgttgtgtgtatgtcctgtgccttttctcactattgtttgggtgtgggagggggtggtttttcactgaaaaggggggtacacctatagctttcttgatgttcaatcaatcagtcactgtgtcccagacatattcaataaacacagattggtaccaccca

SEQ ID NO: 274 - DNA, 5232 bp, Homo sapiens
cggcgcccgggcgcaacgcaaacatggcggcgggtggcacccgtcggtgaggcggtgccgggcgggggttgtcgggtgtcatgggcggtggcgacggcaccgcccccgcgtctccctgagcgggacggcagggggggcttctgcgctgagccgggcgatggacgacagcggcgagctgggtggtctggagaccatggagaccctcacggagctgggcgacgagctgaccctgggagacatcgacgagatgctgcaatttgtcagtaatcaagtgggagagttccctgacttgttttcagaacagctgtgtagctcctttcctggcagtggtggtagtggtagcagcagcggcagcagtggcagcagcagcagcagcagcaatggcaggggcmgcagcagcggagctgtggacccttcagtgcaacggtcattcacccaggtcacattaccttccttctctccctcggcggcctccccacaggctccaactctgcaagtcaaggtttctcccacctcagttccmaccacacccagggcaactcctattcttcagccccgcccccagccccagcctcaacctcaaactcagctgcaacaacagacggtaatgatcacgccaacattcagcaccactccgcagacgaggatcatccagcagcctttgatataccagaatgcagctactagctttcaagtccttcagcctcaagtccaaagcctggtgacatcctcccaggtacagccggtcaccattcagcagcaggtgcagacagtacaggcccagcgggtgctgacacaaacggccaatggcacgctgcagacccttgccccggctacggtgcagacagttgctgcrccacaggtgcagcaggtcccggtcctggtccagcctcagatcatcaagacagattcccttgttttgaccacactgaagacagatggcagccctgttatggctgcggtccagaacccggccctcacygccctcaccacccctatccagacggctgcccttcaagtaccaaccctggtgggcagcagtgggaccattctgaccacaatgcctgtaatgatggggcaagagaaagtgcccattaagcaggtacctgggggagtcaagcagcttgagccccccaaagaaggagaaaggcggacaacccataatatcattgagaaacgatatcgctcctccatcaatgacaaaatcatcgaattgaaagacctggtcatggggacagacgccaagatgcacaagtctggcgttctgaggaaggccattgattacatcaaatacttgcagcaggtcaatcataaactgcgccaggagaacatggtgctgaagctggcaaatcaaaagaacaagcttctaaagggcatcgacctaggcagtctggtggacaatgaggtggacctgaagatcgaggactttaatcagaatgtccttctgatgtcccccccagcctctgactcagggtcccaggctggcttctctccctactccattgactctgagccaggaagccctctattggatgatgcaaaggtcaaagatgagccagactctcctcctgtggcgctgggcatggtagaccgctcacggattcttctgtgtgtcctcaccttcctgtgcctctcctttaaccccctgacttccctgctgcagtggggaggggcccacgactctgaccagcacccacactcaggctctggccgcagtgtcctgtcattcgagtcaggttctgggggctggtttgactggatgatgcctactcttctcttatggctggtaaatggtgtgattgtcctgagcgtctttgtgaagctkctggttcatggggagccagtgatccggccacactcgcgctcctcggtcaccttctggaggcaccggaaacaggcagatctggatctcgccagaggagattttgcagctgctgccgscaacctacaaacctgcctggcagttttgggccgggcactgcccacctcccgcctggacctggcctgcagcctctcctggaacrtgatccgctacagcctgcagaagctacgcctggtgcgctggctgctcaagaaagtcttccagtgccrgcgggccacgccagccactgaggcaggctttgaagacgaagctaagaccagcgcccgggatgcggctctggcctatcaccggctgcaccagctgcacatcacagggaagcttcctgcaggatccgcctgttccgatgtacacatggcgttgtgtgccgtgaacctggctgaatgtgcagaggagaagatcccaccgagcacactggttgagatccatctgactgctgccatggggctcaagacccggtgtggaggcaagctgggcttcctggccagctacttcctcagccgagcccagagcctgtgtggccccgagcacagtgctgttcctgactccctgcgctggctctgccaccccctgggccagaagtttttcatggagcggagctggtctgtgaagtcagctgccaaggagagtctatactgtgcccagaggaacccagctgaccccattgcgcaggtccaccaggccttctgcaagaacctgctggagcgagctatagagtccttggtgaaacctcaggccaagaagaaggctggagaccaggaagaagagagctgtgaattctccagtgctctggagtacttgaaattacttcattcttttgtggactctgtgggggttatgagccccccactctccagsagctccgtgctcaagtccgccctgggtccagacatcatctgtcggtggtggacgtctgcaatcactgtggccatcagctggctccagggagacgatgcagctgtgcgctctcattttaccaaagtggaacgcatccccaaggccctggaagtgacagagagccccctggtgaaggccatcttccatgcctgcagagccatgcatgcctcactccctgggaaagcagatgggcagcagagttccttctgccattgcgagagggccagtggccacctatggagcagcctcaacgtcagtggggccacctctgaccctgccctcaaccacgtggtccagctgctcacctgtgacctgctactgtcgctacggacagcgctctggcaaaaacaggccagtgccagccaggctgtgggggagacctaccacgcgtcaggcgctgaactggcgggcttccaacgggacctgggcagcctgcgcaggctggcacacagcttccgcccagcataccgcaaggtgttcctgcatgaagccaccgtgcgcctgatggcaggagccagccccacccgcacccaccagctgctggaacacagcctgmggcggcgcaccacgcagagcaccaagcacggagaggtggatgcctggcccggccagcgagagcgggccaccgccatcctgctggcctgccgccacctgcccctctccttcctctcctccccgggccagcgggcagtgctgctggccgaagctgcccgcaccctggagaaggtgggcgaccggcgctcctgcaacgactgccagcagatgattgttaagctgggtggtggcactgccattgccgcctcctgaccaccaggctcagcccacccctccacctctctctcgatttctctctcyccccctcagcatcttcccgctgagagtggtggggargagccttgtcttcttagctgtcacctgccgaggcttctgggccactcaggccagtgcacccctgggcagagccccttaaagctgctgtcactagatgcccatggtccagggcctggtgggcgtgagaggataggtggcagggcagaaactgggcagccctgacttgatagcagcagggggagctcccaagctgcyaagcccctgcctccagccttcctgagtttctctctcctgaaccctactctctcctttttgcttcctcagtttttatcaggctttctctgggggacagcagtctctgagcaccagggagcagttgccctcaggcctgtgcccagcatgccctcccctttttatacgaatgttttctaccagtgtgcttgggtttgccatgatgcgaggctgagttgctgtagcgtcttgattctctccctgggtctgcgttccctcccctgggcctgactgagcctgctcattgtttttccctttattacacaggacagccaggggaggaggggggcccagccctgggaggctggtgggaggcagggggcaggcctgcggatgcatgaaataatgttggcattattttttaattttttaaaaaataaatggtatcttatttaattgtcctgttccttcccactccccgcctcctaggatgttagcccaagctcagggtaggcccagggggctgggagaaatgaagccacccatggggactggggaccaggggccttcagcatggcttctaggttccctcctccccctaccccatctcctacctccacagtacagactgtccccaacttaacagtggttcaacttaaaccatgtttcaactttacaattggtctgttggggtattaaatgaatttgtgacttaggatattttcatttatgatgggtttatcargaagtaaccccatggtaagttgaggcatatctgtatatatttaaacctaattaattcttgagctgaaaataaataaaccaggatggcagggaccaacccctaatccctccccagcggcaagcccctcttttcagagtgggcagagggttgcctatggtgggcactaggaatgaggtcccctgcctcgatgcgggtcctaggagaaaaagtcctacttttctgggtccccaggtgcagcacctcccrgagactgtttctcccatggcctcctgagtgatgggccctgcctccctgtgcctcatcctcaggctggttggagcagagggtgggcaggagccccagcacagactggggggtgctcacagcagggccaccttgatgcaggctggaatgttatccctggggtgtgcttggaccccacctgctttctttctctcctgcccctcccctactctcactgtaatttatggaccctgcccgcctgcgtgttgtgtgtatgtcctgtgccttttctcactattgtttgggtgtgggagggggtggtttttcactgaaaaggggggtacacctatagctttcttgatgttcaatcaatcagtcactgtgtcccagacatattcaataaacacagattggtaccacccagcac

SEQ ID NO: 275 - DNA, 3990 bp, Homo sapiens
cgccgcgtaagcggggccggctcagtgcggtgcggcaggcgcggctgtgcggcagcggaagtcctttgttgcagcacagtccctggcagagccagagcctctccgcgcagcccagcccgagcgccgagcgccgcgcgccgccgccactgcagctcgcggccccttcgccttcgcccgcctttcccgcggctgatttgccttaaactccctaaaatctccgcagctctggttcctgttgcggccggtctctaattaacagaagatggcaaagcccagccacagcagctatgtccttcagcagctaaacaaccaaagagartggggttttctctgtgactgctgtattgcaattgatgacatttactttcaagcacacaaggcagttctagctgcctgtagctcctattttagaatgtttttcatgaaccatcagcatagtactgcacaactgaatctcagcaacatgaaaattagtgcagaatgttttgatctcattttgcagtttatgtatttaggaaaaattatgacagctccctccagttttgagcagtttaaagtggcaatgaactacctacagctatacaatgttcctgactgtttagaagacatccaggatgcagattgttctagttcaaaatgttcctcttctgcttccagcaaacagaacagcaaaatgatatttggggtaagaatgtatgaagatactgtggctcgaaatggcaatgaagccaacaggtggtgtgcagagccaagttcaacggtaaatacaccacataatagagaggctgatgaagagtctttacaattaggtaattttcctgagccrctatttgatgtatgtaaaaaaagttccgtgtccaaattatctactccaaaagaacgtgtgtcaagacgctttgggcggagttttacctgtgatagctgtggatttggctttagctgtgaaaaattattagatgagcaygtgctaacctgtactaacagacatttataccaaaacacaagatcttaccatagaatagtagatattagagatggaaaagacagtaacatcaaagctgaatttggtgaaaaagattcttccaaaacattttctgcacagacggacaaatacagaggagacacaagccaggctgctgatgattcagcttcaaccactggaagcagaaaaagtagcacagtggagtctgaaatagcaagcgaagagaaaagcagagctgctgagaggaaaaggattattattaagatggagccagaagatattcctacagatgaactgaaagactttaacattattaaagttactgataaagactgtaatgaatccactgacaatgatgaattagaagatgaacctgaagagccattttatagatactatgttgaagaagatgtcagcataaaaaaaagtggtaggaaaactctaaaacctcgaatgtcagtaagtgctgatgaaagaggtggtttagagaatatgaggccccctaacaacagcagtccagtacaagaggatgctgaaaatgcatcttgtgagctgtgtggacttacaataaccgaggaggacctgtcatctcattacttagccaaacacattgaaaatatctgtgcatgtggtaaatgtggacaaatacttgtaaagggtaggcagcttcaggaacatgctcaacgatgtggcgagccccaagatctgaccatgaatgggttaggaaatactgaggagaaaatggacttggaagagaatcctgatgagcagtccgaaataagagatatgtttgttgaaatgctggatgattttagggacaatcattaccagataaacagtatccaaaaaaagcagttatttaaacattctgcctgcccttttcgatgtcctaattgtggccagcgttttgaaactgaaaatctagtggttgaacatatgtctagctgcttagatcaagatatgtttaagagtgccatcatggaagaaaatgaaagagatcacagacgaaagcatttttgtaatctgtgtggaaaaggattttatcagcggtgtcacttaagagaacactatactgttcatactaaggaaaaacagtttgtttgtcaaacatgtggaaagcagtttttaagagagcgtcagttgcgactgcacaatgatatgcacaaaggcatggccagtggtgaaatagggccttctaaacctgtggagaagtgagagatctgaatttggagaggacatggggaagaatcaatcttcaacagataatctttaagtacagacccaggaatatcagatctgaagtggcaccatcttttctgtcttcctgacaaacttccatcaacccaaaaagttccagttgcaaagatccaagaaaactcagtaaagatcactttggaatcactttgttgtaacaaaattgattcatggtgactctaatatttgtgtaaatctgctgaagaaaagtaactagaaaattcatacaacatcagtggttacagctatactaaaataaaactttatatgctaattatcttcaagggtctttctaaaataaaaggggttgttaggctactgcaaatataaagagacataatcacaaatctatttatatagatataaataattctaaacttaaaatcactagaattatagcttaaatattatgaaatgtacttagtcaacttaaaaacttacaccaaaaatctgtagtttagagtgtaagaagtaatgggtacagagaaaaaaaatttaagaccaatattttaacaggataatttggttattactcactatagtaaaacacttgcccttcttccttttccactgtatatgccagtcacaatcttgatcatttatatgaatgaaactcccttttaaacctgttaacttgaaggagaacagaaatggtattacttcaatagtggtagatttccacaaatcagacacattattttcttctgaacttggcaatataacctaataaggcagaataagtttctgttaaaatacttattctcaatatttatgtataaaccatgcttctcagctttcaaatttcaagataaaatttaagtattcagtaaaatgatggttaacatgttttaaaaaatctttaatggagaagttaaatatttggtgagattttagtctggctataaatgctttgtttgatatatatatgtgcacatatatatattacttaaccatatgaattttatttccttattctgaatatacttgtagttttacttctttctgtttatgtacccaattccttatgattattttgtttcttctgcaatatcaagatgttatttattttgagaaatgcttatttttatgactatttattccaatgttttaacaagaagcacagagatttatagtattcttaatagtatgtgcagaagttacatcatttaaaaaacccttgctgtaaagtaggataacttgaatattcattctaataattagactaagtgaaaatctgagaaagagttaattgcaatgtgatagtgggtagaaaggagagaaaaacccactgaagggttcaaatacatgtgaattctactgctttaagagaaataaaacaaataagcctagggaaatattagagtctaaaaaaccctagagttamtctcttttgggaacataaggaggtatacagaactgcagacctctaaacataagtaggaaaaagaaaaataaaagaatattaccaataattaaaggtgccagatcaaaatagtaataaatcaacaaataatttttgattgactggtggaattagatttactaaataaaaatggcttaaattttgactgtactaactataaatgtaatgaattataataattataaatggtataaatgcattctacaatgtgattattttctgtattttagtatatagtataaaatggaattattgggttaaagtacttttattacatttcttaatccattgtttttacctaataaaatttcctcctctatattccaaagtt

SEQ ID NO: 276 - DNA, 787 bp, Homo sapiens
ctttcccctgctaccagacacgcggtcacgtggggccatcgcgggctgccggcgcgggaagccgcgcgagaggcggccgaggggtgcgtgagccggcgccactgcttgcagtgcgcggcttgggagcccgcccctcctgcacggaggagtcggcctgccgccgcggcggcatctggaaccacaatggacactgccagccatagccttgttcttctccagcagctgaacatgcagcgagaatttggttttctgtgtgattgcacagttgcaattggagatgtttacttcaaagcccacagagcagtgcttgctgctttttctaactatttcaagatgatatttattcaccaaacaaggaaaagaaaaatgagctgtaccatctgtggtcataaattccctcgaaagagccaattgttggaacacatgtatacacacaaagacagcaaatcacccaccttgaggtcataaaggagctggaagctgctgggtgcttgtgctgctctctggacggcctgagccagggctaaggcacmcttgcccccttctgcccagtgagtgcacttcacggcatcaaaagccccatgttctctggaaaggcggctgatgaggtccagctcagactctgtatccgtcctataaaggaagcatttcatatcaaagcatggaaaatggctggagagacagaattgtcttctttttgccattaaacctcatgtgaattacccactgataaacgaacactaaccaagaaatttggcctgggtttgaatctcagctccgaaactta

SEQ ID NO: 277 - DNA, 3344 bp, Homo sapiens
agtgtgatccccyggccagtccctaagcacgtgggttgggttgtcctgcttggctgcggagggagtggaacctcgatattggtggtgtccatcgtgggcagcggactaataaaggccatggcgccagcagaaatcctgaacgggaaggagatctccgcgcaaataagggcgagactgaaaaatcaagtcactcagttgaaggagcaagtacctggtttcacaccacgcctggcaatattacaggttggcaacagagatgattccaatctttatataaatgtgaagctgaaggctgctgaagagattgggatcaaagccactcacattaagttaccaagaacaaccacagaatctgaggtgatgaagtacattacatctttgaatgaagactctactgtacatgggttcttagtgcagctacctttagattcagagaattccattaacactgaagaagtgatcaatgctattgcacccgagaaggatgtggatggattgactagcatcaatgctgggaracttgctagaggtgacctcaatgactgtttcattccttgtacgcctaagggatgcttggaactcatcaaagagacaggggtgcygattgccggaaggcatgctgtggtggttgggcgcagtaaaatagttggggccccgatgcatgacttgcttctgtggaacaatgccacagtgaccacctgccactccaagactgcccatctggatgaggaggtaaataaaggtgacatcctggtggttgcaactggtcagcctgaaatggttaaaggggagtggatcaaacctggggcaatagtcatcgactgtggaatcaattatgtcccagatgataaaaaaccaaatgggagaaaagttgtgggtgatgtggcatacgacgaggccaaagagagggcgagcttcatcactcctgttcctggcggcgtagggcccatgacagttgcaatgctcatgcagagcacagtagagagtgccaagcrtttcctggagaaatttaagccaggaaagtggatgattcagtataacaaccttaacctcaagacacctgttccaagtgacattgatatatcacgatcttgtaaaccgaagcccattggtaagctggctcgagaaattggtctgctgtctgaagaggtagaattatatggtgaaacaaaggccaaagttctgctgtcagcactagaacgcctgaagcaccggcctgatgggaaatacgtggtggtgactggaataactccaacacccctgggagaagggaaaagcacaactacaatcgggctagtgcaagcccttggtgcccatctctaccagaatgtctttgcgtgtgtgcgacagccttctcagggccccacctttggaataaaaggtggcgctgcaggaggcggctactcccaggtcattcctatggaagagtttaatctccacctcacaggtgacatccatgccatcactgcagctaataacctcgttgctgcggccattgatgctcggatatttcatgaactgacccagacagacaaggctctctttaatcgtttggtgccatcagtaaatggagtgagaaggttctctgacatccaaatccgaaggttaaagagactaggcattgaaaagactgaccctaccacactgacagatgaagagataaacagatttgcaagattggacattgatccagaaaccataacttggcaaagagtgttggataccaatgatagattcctgaggaagatcacgattggacaggctccaacggagaagggtcacacacggacggcccagtttgatatctctgtggccagtgaaattatggctgtcctggctctcaccacttctctagaagacatgagagagagactgggcaaaatggtggtggcatccagtaagaaaggagagcccgtcagtgccgaagatctgggggtgagtggtgcactgacagtgcttatgaaggacgcaatcaagcccaatctcatgcagacactggagggcactccagtgtttgtccatgctggcccgtttgccaacatcgcacatggcaattcctccatcattgcagaccrgatcgcactcaagcttgttggcccagaagggtttgtagtgacggaagcaggatttggagcagacattggaatggaaaagttttttaacatcaaatgccggtattccggcctctgcccccacgtggtggtgcttgttgccactgtcagggctctcaagatgcacgggggcggccccacggtcactgctggactgcctcttcccaaggcttacatacaggagaacctggagctggttgaaaaaggcttcagtaacttgaagaaacaaattgaaaatgccagaatgtttggaattccagtagtagtggccgtgaatgcattcaagacggatacagagtctgagctggacctcatcagccgcctttccagagaacatggggcttttgatgccgtgaagtgcactcactgggcagaagggggcaagkgtgccttagccctggctcaggccgtccagagagcagcacaagcacccagcagcttccagctcctttatgacctcaagctcccagttgaggataaaatcaggatcattgcacagaagatctatggagcagatgacattgaattacttcccgaagctcaacacaaagctgaagtctacacgaagcagggctttgggaatctccccatctgcatggctaaaacacacttgtctttgtctcacaacccagagcaaaaaggtgtccctacaggcttcattctgcccattcgcgacatccgcgccagcgttggggctggttttctgtaccccttagtaggaacgatgagcacaatgcctggactccccacccggccctgtttttatgatattgatttggaccytgaaacagaacaggtgaatggattattctaaacagacttccctgaggggagaggggatagtaatgagagttggcaataaccaatgaattgaaatatttatatttcaacacatttttggaagaagcgcagcatggcttgtcacaggttgacagtgtaggggagaaaactgctgtccaataaactacagaggaaactacaggagagatcaccatccatcttcaagaagctactttraaagtctggccagtgtctattcaggcccactgggagttaggaagtataagtaagccaagagaagtcagcccctgyccagaagatctgaaactaatagtaggagtttccccagamgtcattttcagccttaattctcatcatgtataaattaacataaatcatgcatgtctgtttactttagtgacgttccacagaataaaaggaaacaagtttgcc

SEQ ID NO: 278 - DNA, 3217 bp, Homo sapiens
agtgtgatccccyggccagtccctaagcacgtgggttgggttgtcctgcttggctgcggagggagtggaacctcgatattggtggtgtccatcgtgggcagcggactaataaaggccatggcgccagcagaaatcctgaacgggaaggagatctccgcgcaaataagggcgagactgaaaaatcaagtcactcagttgaaggagcaagtacctggtttcacaccacgcctggcaatattacaggttggcaacagagatgattccaatctttatataaatgtgaagctgaaggctgctgaagagattgggatcaaagccactcacattaagttaccaagaacaaccacagaatctgaggtgatgaagtacattacatctttgaatgaagactctactgtacatgggttcttagtgcagctacctttagattcagagaattccattaacactgaagaagtgatcaatgctattgcacccgagaaggatgtggatggattgactagcatcaatgctgggaracttgctagaggtgacctcaatgactgtttcattccttgtacgcctaagggatgcttggaactcatcaaagagacaggggtgcygattgccggaaggcatgctgtggtggttgggcgcagtaaaatagttggggccccgatgcatgacttgcttctgtggaacaatgccacagtgaccacctgccactccaagactgcccatctggatgaggaggtaaataaaggtgacatcctggtggttgcaactggtcagcctgaaatggttaaaggggagtggatcaaacctggggcaatagtcatcgactgtggaatcaattatgtcccagatgataaaaaaccaaatgggagaaaagttgtgggtgatgtggcatacgacgaggccaaagagagggcgagcttcatcactcctgttcctggcggcgtagggcccatgacagttgcaatgctcatgcagagcacagtagagagtgccaagcrtttcctggagaaatttaagccaggaaagtggatgattcagtataacaaccttaacctcaagacacctgttccaagtgacattgatatatcacgatcttgtaaaccgaagcccattggtaagctggctcgagaaattggtctgctgtctgaagaggtagaattatatggtgaaacaaaggccaaagttctgctgtcagcactagaacgcctgaagcaccggcctgatgggaaatacgtggtggtgactggaataactccaacacccctgggagaagggaaaagcacaactacaatcgggctagtgcaagcccttggtgcccatctctaccagaatgtctttgcgtgtgtgcgacagccttctcagggccccacctttggaataaaaggtggcgctgcaggaggcggctactcccaggtcattcctatggaagagtttaatctccacctcacaggtgacatccatgccatcactgcagctaataacctcgttgctgcggccattgatgctcggatatttcatgaactgacccagacagacaaggctctctttaatcgtttggtgccatcagtaaatggagtgagaaggttctctgacatccaaatccgaaggttaaagagactaggcattgaaaagactgaccctaccacactgacagatgaagagataaacagatttgcaagattggacattgatccagaaaccataacttggcaaagagtgttggataccaatgatagattcctgaggaagatcacgattggacaggctccaacggagaagggtcacacacggacggcccagtttgatatctctgtggccagtgaaattatggctgtcctggctctcaccacttctctagaagacatgagagagagactgggcaaaatggtggtggcatccagtaagaaaggagagcccgtcagtgccgaagatctgggggtgagtggtgcactgacagtgcttatgaaggacgcaatcaagcccaatctcatgcagacactggagggcactccagtgtttgtccatgctggcccgtttgccaacatcgcacatggcaattcctccatcattgcagaccrgatcgcactcaagcttgttggcccagaagggtttgtagtgacggaagcaggatttggagcagacattggaatggaaaagttttttaacatcaaatgccggtattccggcctctgcccccacgtggtggtgcttgttgccactgtcagggctctcaagatgcacgggggcggccccacggtcactgctggactgcctcttcccaaggcttacatacaggagaacctggagctggttgaaaaaggcttcagtaacttgaagaaacaaattgaaaatgccagaatgtttggaattccagtagtagtggccgtgaatgcattcaagacggatacagagtctgagctggacctcatcagccgcctttccagagaacatggggcttttgatgccgtgaagtgcactcactgggcagaagggggcaagkgtgccttagccctggctcaggccgtccagagagcagcacaagcacccagcagcttccagctcctttatgacctcaagctcccagttgaggataaaatcaggatcattgcacagaagatctatggagcagatgacattgaattacttcccgaagctcaacacaaagctgaagtctacacgaagcagggctttgggaatctccccatctgcatggctaaaacacacttgtctttgtctcacaacccagagcaaaaaggtgtccctacaggcttcattctgcccattcgcgacatccgcgccagcgttggggctggttttctgtaccccttagtaggaacgatgagcacaatgcctggactccccacccggccctgtttttatgatattgatttggaccytgaaacagaacaggtgaatggattattctaaacagatcaccatccatcttcaagaagctactttraaagtctggccagtgtctattcaggcccactgggagttaggaagtataagtaagccaagagaagtcagcccctgyccagaagatctgaaactaatagtaggagtttccccagamgtcattttcagccttaattctcatcatgtataaattaacataaatcatgcatgtctgtttactttagtgacgttccacagaataaaaggaaacaagtttgccatcttggtgttgcaatatgaattacagccttaacagactgtg

SEQ ID NO: 279 - DNA, 1496 bp, Homo sapiens
  misc_feature (1)...(1496): n = A,T,C or G, or insertion/deletion polymorphism (see Tables 1-2)
tagtccttcccctccactcccttcctcttttctgctcacacaggaagccctggaagctgcttcctcagacatgccrctgctgctactgctgcccctgctgtgggcaggggycctggctatggatccaaatttcyggctgcaagtgcaggagtcagtgacggtacaggagggtttgtgcgtcctcgtgccctgcactttctyccatcccataccctactacgacaagaactccccagttcatggttactggttccgggaaggagccattatatccngggactctccagtggccacaaacaagctagatcaagaagtacaggaggagactcagggcagattccgcctccttggggatcccagtaggaacaactgctccctgagcatcgtagacgccaggaggagggataatggttcatacttctttcggatggagagaggaagtaccaaatacarttacaaatctccccagctctctgtgcrtgtgacagacttgacccacaggcccaaaatcctcatccctggcactctagaacccggccactccaaaaacctgacctgctctgtgtcctgggcctgtgagcagggaacacccccgatcttctcctggttgtcagctgcccccacctccctgggccccaggactactcactcctcggtgctcataatcaccccayggccccaggaccacggcaccaacctgacctgtcaggtgaagttcgctggagctggtgtgactacggagagaaccatccagctcaacgtcacctatgttccacagaacccaacaactggtmtcnttccaggagatggctcagggaaacaagagaccagagcaggagtggttcatggggccattggaggagctggtrttacagccctgctcgctctttgtctctgcctcatcttcttcatagtgaagacccacaggaggaaagcagccaggacagcaktgggcaggaatgacacccaccctaccacarggycagcctccccyaaacaccagaagaagtccaagttacatggccccactgaaacctcaagctgttcaggtgccgcccctrctgtggagatggatgaggagctgcattatgcttccctcaactttcatgggatgaatccttccaaggacacctccacygaatactcagaggtcaggacccagtgaggaacccwcaagagcatcaggctcagctagaagatccacatcctctacaggtcggggaccaaaggctgattcttggagatttaacwccccacaggcaatgggtttatagacattatgtgagtttcctgctatattaacatcatcttagactttgcaagcagagagtcgtggaatcaaatctgtgctctttcatttgctaastgtatgatgtcacacaagctccttaaccttccatgtctccattttcttctctgtgaagtaggtataagaagtcctatctcatagggatgctgtgagcattaaataaaggtacacatggaaaacaccagtc

SEQ ID NO: 280 - DNA, 1067 bp, Homo sapiens
tagtccttcccctccactcccttcctcttttctgctcacacaggaagccctggaagctgcttcctcagacatgccrctgctgctactgctgcccctgctgtgggcagacttgacccacaggcccaaaatcctcatccctggcactctagaacccggccactccaaaaacctgacctgctctgtgtcctgggcctgtgagcagggaacacccccgatcttctcctggttgtcagctgcccccacctccctgggccccaggactactcactcctcggtgctcataatcaccccayggccccaggaccacggcaccaacctgacctgtcaggtgaagttcgctggagctggtgtgactacggagagaaccatccagctcaacgtcacctggaaacaagagaccagagcaggagtggttcatggggccattggaggagctggtrttacagccctgctcgctctttgtctctgcctcatcttcttcatagtgaagacccacaggaggaaagcagccaggacagcaktgggcaggaatgacacccaccctaccacarggycagcctccccyaaacaccagaagaagtccaagttacatggccccactgaaacctcaagctgttcaggtgccgcccctrctgtggagatggatgaggagctgcattatgcttccctcaactttcatgggatgaatccttccaaggacacctccacygaatactcagaggtcaggacccagtgaggaacccwcaagagcatcaggctcagctagaagatccacatcctctacaggtcggggaccaaaggctgattcttggagatttaacwccccacaggcaatgggtttatagacattatgtgagtttcctgctatattaacatcatcttagactttgcaagcagagagtcgtggaatcaaatctgtgctctttcatttgctaastgtatgatgtcacacaagctccttaaccttccatgtctccattttcttctctgtgaagtaggtataagaagtcctatctcatagggatgctgtgagcattaaataaaggtacacatggaaaacaccagtc

SEQ ID NO: 281 - DNA, 1115 bp, Homo sapiens
  misc_feature (1)...(1115): n = A,T,C or G, or insertion/deletion polymorphism (see Tables 1-2)
tagtccttcccctccactcccttcctcttttctgctcacacaggaagccctggaagctgcttcctcagacatgccrctgctgctactgctgcccctgctgtgggcagacttgacccacaggcccaaaatcctcatccctggcactctagaacccggccactccaaaaacctgacctgctctgtgtcctgggcctgtgagcagggaacacccccgatcttctcctggttgtcagctgcccccacctccctgggccccaggactactcactcctcggtgctcataatcaccccayggccccaggaccacggcaccaacctgacctgtcaggtgaagttcgctggagctggtgtgactacggagagaaccatccagctcaacgtcacctatgttccacagaacccaacaactggtmtcnttccaggagatggctcagggaaacaagagaccagagcaggagtggttcatggggccattggaggagctggtrttacagccctgctcgctctttgtctctgcctcatcttcttcatagtgaagacccacaggaggaaagcagccaggacagcaktgggcaggaatgacacccaccctaccacarggycagcctccccyaaacaccagaagaagtccaagttacatggccccactgaaacctcaagctgttcaggtgccgcccctrctgtggagatggatgaggagctgcattatgcttccctcaactttcatgggatgaatccttccaaggacacctccacygaatactcagaggtcaggacccagtgaggaacccwcaagagcatcaggctcagctagaagatccacatcctctacaggtcggggaccaaaggctgattcttggagatttaacwccccacaggcaatgggtttatagacattatgtgagtttcctgctatattaacatcatcttagactttgcaagcagagagtcgtggaatcaaatctgtgctctttcatttgctaastgtatgatgtcacacaagctccttaaccttccatgtctccattttcttctctgtgaagtaggtataagaagtcctatctcatagggatgctgtgagcattaaataaaggtacacatggaaaacaccagtc

SEQ ID NO: 282 - DNA, 1486 bp, Homo sapiens
tggtgcacgcctgtgatcccagcaacttgggaggatgaggcttaagaattgcttgaatgtgggaggtggaggttgcagtgagttgagatcacaccactgcaccccagcctgggttgacagagtgagactctgtcccaaaaaaaaaagagggagatgtctggaaggctaggagatttgagagtaagagcatgaattcagctctgttacctgtagcttccagaaaaaggagctgtatggggagagagaatatggtcccatggagaattttctacaaatgtgcaagtgcaaacgcctgtgtggcttatgagaaggcactgcaggccttacgctktttccaacattcccgacattttcacacctgggttggtgtctatgtggggtctgtgtgttgagaayacctgaacacctgctcctcttaaaatgagcccggaggttktgccaggcacagctggagcagtgcagcgcctagatgtggctgtggaaggtgagattaccgcctccagggctcccaggctggctcctaccctgtgggctcctagcaccctatccccaccctccctgcaggaagcatggctgagtgctgggcacctcccaccctgggtcactcccagtgagtctgggaccaggagactctggtgaggctgtggggattggccttccctggggagctgcctggggctgccctccctcctgacggcccccagccccttctccgcatgttcaaaacaggaattctgaactcatagtctccagccacacgtatgttaagcgaaactcctctgtgcccagcatgaaatcaaaagcaagtttttcctttttctttccacggtggtgaaggcggtcatcctcttgtagcctagggttccttggccaaattgctagttgccgatgacctcggggctcggcttgcgagcaacactgggctggaatctgtctccaggaaacccaggcccttttattgttgctgtgtcccccagagggcagggccaagctgaggccattctgtcatgctcaggaaggtagaagatggcccaaagggaagcacacctgcagtaggagggggggcagcggtgggcagggcacagcttccctgcaggttagaccccctcgcaggccagctgcctgcycctgcaggaaccgtgggtctcgggagaggctgccatccctgcacatgacagatcacgcgctgccccatgatcccgtgctacatctcctccccggacgagtgcctctggatggactgggtcacagagaagaacatcaacgggcaccaggccaagttcttcgcctgcatcaagagaagtgacggctcctgtgcgtggtaccgcggcgcggcgccccccaagcaggagtttctcgacatcgaggacccataagcaggcctccaacgcccctgtggccaactgcaaaaaaagcctccaagggtttcgactggtccagctctgacatcccttcctggaaacagcatgaataaaacactcatccc

SEQ ID NO: 283 - DNA, 2862 bp, Homo sapiens
cttgaacctgggagatagaggttgcagtgagccaaaacggtgccactgcactccagcctgggcaacagmgcgagactccatctcaayaacaacaacaacaaaaattactcatagaacattttccaggtcaggaaagatgagaagagctggatagacctttccagatgtaagacccccaaasctaaatatgccggtgatcagggccaaagcggtcagtgagaaggaagtggactctggaaacgacatttatggcaaccctatcaagaggatccagtatgagatcaagcagataaagatgttcaaagggcctgagaaggatatagagtttatctacacggccccctcctcggcagtgtgtggggtctcrctggacgttggaggaaagaaggaatatctcattgcaggaaaggccgagggggacggcaagatgcacatcaccctctgtgacttcatcgtgccctgggacaccctgagcaccacccagaagaagagcctgaaccacaggtaccagatgggctgcgagtgcaagatcacgcgctgccccatgatcccgtgctacatctcctccccggacgagtgcctctggatggactgggtcacagagaagaacatcaacgggcaccaggccaagttcttcgcctgcatcaagagaagtgacggctcctgtgcgtggtaccgcggcgcggcgccccccaagcaggagtttctcgacatcgaggacccataagcaggcctccaacgcccctgtggccaactgcaaaaaaagcctccaagggtttcgactggtccagctctgacatcccttcctggaaacagcatgaataaaacactcatcccatgggtccaaattaatatgattctgctccccccttctccttttagacatggttgtgggtctggagggagacgtgggtccaaggtcctcatcccatcctccctctgccaggcactatgtgtctggggcttcgatccttgggtgcaggcagggctgggacacgcggcttccctcccagtccctgccttggcaccgtcacagatgccaagcaggcagcacttagggatctcccagctgggttagggcagggcctggaaatgtgcattttgcagaaacttttgagggtcgttgcaagactgtgtagcaggcctaccaggtccctttcatcttgagagggacatggcccttgttttctgcagcttccacgcctctgcactccctgcccctggcaagtgctcccatcgccccggtgcccaccatgagctcccagcacctgactccccccacatccaagggcagcctggaaccagtggctagttcttgaaggagccccatcaatcctattaatcctcagaattccagtgggagcctccctctgagccttgtagaaatgggagcgagaaaccccagctgagctgcgttccagcctcagctgagtctttttggtctgcacccacccccccaccccccccccccgcccacatgctccccagcttgcaggaggaatcggtgaggtcctgtcctgaggctgctgtccggggccggtggctgccctcaaggtcccttccctagctgctgcggttgccattgcttcttgcctgttctggcatcaggcacctggattgagttgcacagctttgctttatccgggcttgtgtgcagggcccggctgggctccccatctgcacatcctgaggacagaaaaagctgggtcttgctgtgccctcccaggcttagtgttccctccctcaaagactgacagccatcgttctgcacggggctttctgcatgtgacgccagctaagcatagtaagaagtccagcctaggaagggaaggattttggaggtaggtggctttggtgacacactcacttctttctcagcctccaggacactatggcctgttttaagagacatcttatttttctaaaggtgaattctcagatgataggtgaacctgagttgcagatataccaacttctgcttgtatttcttaaatgacaaagattacctagctaagaaacttcctagggaactagggaacctatgtgttccctcagtgtggtttcctgaagccagtgatatgggggttaggataggaagaactttctcggtaatgataaggagaatctcttgtttcctcccacctgtgttgtaaagataaactgacgatatacaggcacattatgtaaacatacacacgcaatgaaaccgaagcttggcggcctgggcgtggtcttgcaaaatgcttccaaagccaccttagcctgttctattcagcggcaaccccaaagcacctgttaagactcctgacccccaagtggcatgcagcccccatgcccaccgggacctggtcagcacagatcttgatgacttccctttctagggcagactggragggtatccaggaatcggcccctgccccacgggcgttttcatgctgtacagtgacctaaagttggtaagatgtcataatggaccagtccatgtgatttcagtatatacaactccaccagacccctccaacccatataacaccccacccctgttcgcttcctgtatggtgatatcatatgtaacatttactcctgtttctgctgattgtttttttaatgttttggtttgtttttgacatcagctgtaatcattcctgtgctgtgttttttattacccttggtaggtattagacttgcacttttttwaaaaaaggtttctgcatcctggaatatgaagtctgagaccttccsgtgctgggaacacacaagagttgttgaaagttgacaagcagactgcgcatgtctctgatgctttgtatcattcttgagcaatcgctcggtccgtggacaataaacagtattatcaaagag

SEQ ID NO: 284 - DNA, 3408 bp, Homo sapiens
cttgaacctgggagatagaggttgcagtgagccaaaacggtgccactgcactccagcctgggcaacagmgcgagactccatctcaayaacaacaacaacaaaaattactcatagaacattttccaggtcaggaaagatgagaagagctggatagacctttccagatgtaagacccccaaasctaaatatgccggtgatcagggccaaagcggtcagtgagaaggaagtggactctggaaacgacatttatggcaaccctatcaagaggatccagtatgagatcaagcagataaagatgttcaaagggcctgagaaggatatagagtttatctacacggccccctcctcggcagtgtgtggggtctcrctggacgttggaggaaagaaggaatatctcattgcaggaaaggccgagggggacggcaagatgcacatcaccctctgtgacttcatcgtgccctgggacaccctgagcaccacccagaagaagagcctgaaccacaggtaccagatgggctgcgagtgcaagatcacgcgctgccccatgatcccgtgctacatctcctccccggacgagtgcctctggatggactgggtcacagagaagaacatcaacgggcaccaggccaagttcttcgcctgcatcaagagaagtgacggctcctgtgcgtggtaccgcggcgcggcgccccccaagcaggagtttctcgacatcgaggacccataagcaggcctccaacgcccctgtggccaactgcaaaaaaagcctccaagggtttcgactggtccagctctgacatcccttcctggaaacagcatgaataaaacactcatcccatgggtccaaattaatatgattctgctccccccttctccttttagacatggttgtgggtctggagggagacgtgggtccaaggtcctcatcccatcctccctctgccaggcactatgtgtctggggcttcgatccttgggtgcaggcagggctgggacacgcggcttccctcccagtccctgccttggcaccgtcacagatgccaagcaggcagcacttagggatctcccagctgggttagggcagggcctggaaatgtgcattttgcagaaacttttgagggtcgttgcaagactgtgtagcaggcctaccaggtccctttcatcttgagagggacatggcccttgttttctgcagcttccacgcctctgcactccctgcccctggcaagtgctcccatcgccccggtgcccaccatgagctcccagcacctgactccccccacatccaagggcagcctggaaccagtggctagttcttgaaggagccccatcaatcctattaatcctcagaattccagtgggagcctccctctgagccttgtagaaatgggagcgagaaaccccagctgagctgcgttccagcctcagctgagtctttttggtctgcacccacccccccaccccccccccccgcccacatgctccccagcttgcaggaggaatcggtgaggtcctgtcctgaggctgctgtccggggccggtggctgccctcaaggtcccttccctagctgctgcggttgccattgcttcttgcctgttctggcatcaggcacctggattgagttgcacagctttgctttatccgggcttgtgtgcagggcccggctgggctccccatctgcacatcctgaggacagaaaaagctgggtcttgctgtgccctcccaggcttagtgttccctccctcaaagactgacagccatcgttctgcacggggctttctgcatgtgacgccagctaagcatagtaagaagtccagcctaggaagggaaggattttggaggtaggtggctttggtgacacactcacttctttctcagcctccaggacactatggcctgttttaagagacatcttatttttctaaaggtgaattctcagatgataggtgaacctgagttgcagatataccaacttctgcttgtatttcttaaatgacaaagattacctagctaagaaacttcctagggaactagggaacctatgtgttccctcagtgtggtttcctgaagccagtgatatgggggttaggataggaagaactttctcggtaatgataaggagaatctcttgtttcctcccacctgtgttgtaaagataaactgacgatatacaggcacattatgtaaacatacacacgcaatgaaaccgaagcttggcggcctgggcgtggtcttgcaaaatgcttccaaagccaccttagcctgttctattcagcggcaaccccaaagcacctgttaagactcctgacccccaagtggcatgcagcccccatgcccaccgggacctggtcagcacagatcttgatgacttccctttctagggcagactggragggtatccaggaatcggcccctgccccacgggcgttttcatgctgtacagtgacctaaagttggtaagatgtcataatggaccagtccatgtgatttcagtatatacaactccaccagacccctccaacccatataacaccccacccctgttcgcttcctgtatggtgatatcatatgtaacatttactcctgtttctgctgattgtttttttaatgttttggtttgtttttgacatcagctgtaatcattcctgtgctgtgttttttattacccttggtaggtattagacttgcacttttttwaaaaaaggtttctgcatcgtggaagcatttgacccagagtggaacgcgtggcctatgcaggtggattccttcaggtctttcctttggttctttgagcatctttgctttcattcgtctcccgtctttggttctccagttcaaattattgcaaagtaaaggatctttgagtaggttcggtctgaaaggtgtggcctttatatttgatccacacacgttggtcttttaaccgtgctgagcagaaaacaaaacaggttaagaagagccgggtggcagctgacagaggaagccgctcaaataccttcacaataaatagtggcaatatatatrtagtttaagaaggctctccatttggcatcgtttaatttatatgttatgttctaagcacagctctcttctcctattttcatcctgcaagcaactcaaaatatttaaaataaagtttacattgtagttattttcaaatctttgcttgataagtattaagaaatattggacttgctgccgtaatttaaagctctgttgattttgtttccgtttggatttttgggggaggggagcactgtgtttatgctggaatatgaagtctgagaccttccsgtgctgggaacacacaagagttgttgaaagttgacaagcagactgcgcatgtctctgatgctttgtatcattcttgagcaatcgctcggtccgtggacaataaacagtattatc

SEQ ID NO: 285 - protein, 360 aa, Homo sapiens
MLSTSRSRFIRNTNESGEEVTTFFDYDYGAPCHKFDVKQIGAQLLPPLYSLVFIFGFVGNMLVVLILINCKKLKCLTDIYLLNLAISDLLFLITLPLWAHSAANEWVFGNAMCKLFTGLYHIGYFGGIFFIILLTIDRYLAIVHAVFALKARTVTFGVVTSVITWLVAVFASVPGIIFTKCQKEDSVYVCGPYFPRGWNNFHTIMRNILGLVLPLLIMVICYSGILKTLLRCRNEKKRHRAVRVIFTIMIVYFLFWTPYNIVILLNTFQEFFGLSNCESTSQLDQATQVTETLGMTHCCINPIIYAFVGEKFRRYLSVFFRKHITKRFCKQCPVFYRETVDGVTSTNTPSTGEQEVSAGL

SEQ ID NO: 286 - protein, 360 aa, Homo sapiens; identical to SEQ ID NO: 285

SEQ ID NO: 287 - protein, 374 aa, Homo sapiens
MLSTSRSRFIRNTNESGEEVTTFFDYDYGAPCHKFDVKQIGAQLLPPLYSLVFIFGFVGNMLVVLILINCKKLKCLTDIYLLNLAISDLLFLITLPLWAHSAANEWVFGNAMCKLFTGLYHIGYFGGIFFIILLTIDRYLAIVHAVFALKARTVTFGVVTSVITWLVAVFASVPGIIFTKCQKEDSVYVCGPYFPRGWNNFHTIMRNILGLVLPLLIMVICYSGILKTLLRCRNEKKRHRAVRVIFTIMIVYFLFWTPYNIVILLNTFQEFFGLSNCESTSQLDQATQVTETLGMTHCCINPIIYAFVGEKFRSLFHIALGCRIAPLQKPVCGGPGVRPGKNVKVTTQGLLDGRGKGKSIGRAPEASLQDKEGA

SEQ ID NO: 288 - protein, 485 aa, Homo sapiens
MRKRAPQSEMAPAGVSLRATILCLLAWAGLAAGDRVYIHPFHLVIHNESTCEQLAKANAGKPKDPTFIPAPIQAKTSPVDEKALQDQLVLVAAKLDTEDKLRAAMVGMLANFLGFRIYGMHSELWGVVHGATVLSPTAVFGTLASLYLGALDHTADRLQAILGVPWKDKNCTSRLDAHKVLSALQAVQGLLVAQGRADSQAQLLLSTVVGVFTAPGLHLKQPFVQGLALYTPVVLPRSLDFTELDVAAEKIDRFMQAVTGWKTGCSLMGASVDSTLAFNTYVHFQGKMKGFSLLAEPQEFWVDNSTSVSVPMLSGMGTFQHWSDIQDNFSVTQVPFTESACLLLIQPHYASDLDKVEGLTFQQNSLNWMKKLSPRTIHLTMPQLVLQGSYDLQDLLAQAELPAILHTELNLQKLSNDRIRVGEVLNSIFFELEADEREPTESTQQLNKPEVLEVTLNRPFLFAVYDQSATALHFLGRVANPLSTA

SEQ ID NO: 289 - protein, 485 aa, Homo sapiens; identical to SEQ ID NO: 288

SEQ ID NO: 290 - protein, 350 aa, Homo sapiens
MSNITDPQMWDFDDLNFTGMPPADEDYSPCMLETETLNKYVVIIAYALVFLLSLLGNSLVMLVILYSRVGRSVTDVYLLNLALADLLFALTLPIWAASKVNGWIFGTFLCKVVSLLKEVNFYSGILLLACISVDRYLAIVHATRTLTQKRHLVKFVCLGCWGLSMNLSLPFFLFRQAYHPNNSSPVCYEVLGNDTAKWRMVLRILPHTFGFIVPLFVMLFCYGFTLRTLFKAHMGQKHRAMRVIFAVVLIFLLCWLPYNLVLLADTLMRTQVIQESCERRNNIGRALDATEILGFLHSCLNPIIYAFIGQNFRHGFLKILAMHGLVSKEFLARHRVTSYTSSSVNVSSNL

SEQ ID NO: 291 - protein, 534 aa, Homo sapiens
MMEALGFLKLEVNGPMVTVALSVALLALLKWYSTSAFSRLEKLGLRHPKPSPFIGNLTFFRQGFWESQMELRKLYGPLCGYYLGRRMFIVISEPDMIKQVLVENFSNFTNRMASGLEFKSVADSVLFLRDKRWEEVRGALMSAFSPEKLNEMVPLISQACDLLLAHLKRYAESGDAFDIQRCYCNYTTDVVASVAFGTPVDSWQAPEDPFVKHCKRFFEFCIPRPILVLLLSFPSIMVPLARILPNKNRDELNGFFNKLIRNVIALRDQQAAEERRRDFLQMVLDARHSASPMGVQDFDIVRDVFSSTGCKPNPSRQHQPSPMARPLTVDEIVGQAFIFLIAGYEIITNTLSFATYLLATNPDCQEKLLREVDVFKEKHMAPEFCSLEEGLPYLDMVIAETLRMYPPAFRFTREAAQDCEVLGQRIPAGAVLEMAVGALHHDPEHWPSPETFNPERFTAEARQQHRPFTYLPFGAGPRSCLGVRLGLLEVKLTLLHVLHKFRFQACPETQVPLQLESKSALGPKNGVYIKIVSR

SEQ ID NO: 292 - protein, 534 aa, Homo sapiens; identical to SEQ ID NO: 291

SEQ ID NO: 293 - protein, 460 aa, Homo sapiens
MMEALGFLKLEVNGPMVTVALSVALLALLKWYSTSAFSRLEKLGLRHPKPSPFIGNLTFFRQGFWESQMELRKLYGPLCGYYLGRRMFIVISEPDMIKQVLVENFSNFTNRMASGLEFKSVADSVLFLRDKRWEEVRGALMSAFSPEKLNEMVPLISQACDLLLAHLKRYAESGDAFDIQRCYCNYTTDVVASVAFGTPVDSWQAPEDPFVKHCKRFFEFCIPRPILVLLLSFPSIMVPLARILPNKNRDELNGFFNKLIRNVIALRDQQAAEERRRDFLQMVLDARHSASPMGVQDFDIVRDVFSSTGCKPNPSRQHQPSPMARPLTVDEIVGQAFIFLIAGYEIITNTLSFATYLLATNPDCQEKLLREVDVFKEKHMAPEFCSLEEGLPYLDMVIAETLRMYPPAFRFTREAAQDCEVLGQRIPAGAVLEMAVGALHHDPEHWPSPETFNPERYRCS

SEQ ID NO: 294 - protein, 134 aa, Homo sapiens
MKEQGLLDAVTYLAGVSGSTWAISSLYTNDGDMEALEADLKHRFTRQEWDLAKSLQKTIQAARSENYSLTDFWAYMVISKQTRELPESHLSNMKKPVEEGTLPYPIFAAIDNDLQPSWQEARAPGKQTFRGRER

SEQ ID NO: 295 - protein, 384 aa, Homo sapiens
MGSSEVSIIPGLQKEEKAAVERRRLHVLKALKKLRIEADEAPVVAVLGSGGGLRAHIACLGVLSEMKEQGLLDAVTYLAGVSGSTWAISSLYTNDGDMEALEADLKHRFTRQEWDLAKSLQKTIQAARSENYSLTDFWAYMVISKQTRELPESHLSNMKKPVEEGTLPYPIFAAIDNDLQPSWQEARAPETWFEFTPHHAGFSALGAFVSITHFGSKFKKGRLVRTHPERDLTFLRGLWGSALGNTEVIREYIFDQLRNLTLKGLWRRAVANAKSIGHLIFARLLRLQESSQGEHPPPEDEGGEPEHTWLTEMLENWTRTSLEKQEQPHEDPERKGSLSNLMDFVKKTGICASKWEWGTTHNFLYKHEFDSFHQQEEPFPEVLS

SEQ ID NO: 296 - protein, 541 aa, Homo sapiens
MGSSEVSIIPGLQKEEKAAVERRRLHVLKALKKLRIEADEAPVVAVLGSGGGLRAHIACLGVLSEMKEQGLLDAVTYLAGVSGSTWAISSLYTNDGDMEALEADLKHRFTRQEWDLAKSLQKTIQAARSENYSLTDFWAYMVISKQTRELPESHLSNMKKPVEEGTLPYPIFAAIDNDLQPSWQEARAPETWFEFTPHHAGFSALGAFVSITHFGSKFKKGRLVRTHPERDLTFLRGLWGSALGNTEVIREYIFDQLRNLTLKGLWRRAVANAKSIGHLIFARLLRLQESSQGEHPPPEDEGGEPEHTWLTEMLENWTRTSLEKQEQPHEDPERKGSLSNLMDFVKKTGICASKWEWGTTHNFLYKHGGIRDKIMSSRKHLHLVDAGLAINTPFPLVLPPTREVHLILSFDFSAGDPFETIRATTDYCRRHKIPFPQVEEAELDLWSKAPASCYILKGETGPVVMHFPLFNIDACGGDIEAWSDTYDTFKLADTYTLDVVVLLLALAKKNVRENKKKILRELMNVAGLYYPKDSARSCCLA

SEQ ID NO: 297 - protein, 541 aa, Homo sapiens; identical to SEQ ID NO: 296

SEQ ID NO: 298 - protein, 430 aa, Homo sapiens [sequence omitted]

SEQ ID NO: 299 - protein, 1405 aa, Homo sapiens
MSEKKLETTAQQRKCPEWMNVQNKRCAVEERKACVRKSVFEDDLPFLEFTGSIVYSYDASDCSFLSEDISMSLSDGDVVGFDMEWPPLYNRGKLGKVALIQLCVSESKCYLFHVSSMSVFPQGLKMLLENKAVKKAGVGIEGDQWKLLRDFDIKLKNFVELTDVANKKLKCTETWSLNSLVKHLLGKQLLKDKSIRCSNWSKFPLTEDQKLYAATDAYAGFIIYRNLEILDDTVQRFAINKEEEILLSDMNKQLTSISEEVMDLAKHLPHAFSKLENPRRVSILLKDISENLYSLRRMIIGSTNIETELRPSNNLNLLSFEDSTTGGVQQKQIREHEVLIHVEDETWDPTLDHLAKHDGEDVLGNKVERKEDGFEDGVEDNKLKENMERACLMSLDITEHELQILEQQSQEEYLSDIAYKSTEHLSPNDNENDTSYVIESDEDLEMEMLKSLENLNSGTVEPTHSKCLKMERNLGLPTKEEEEDDENEANEGEEDDDKDFLWPAPNEEQVTCLKMYFGHSSFKPVQWKVIHSVLEERRDNVAVMATGYGKSLCFQYPPVYVGKIGLVISPLISLMEDQVLQLKMSNIPACFLGSAQSENVLTDIKLGKYRIVYVTPEYCSGNMGLLQQLEADIGITLIAVDEAHCISEWGHDFRDSFRKLGSLKTALPMVPIVALTATASSSIREDIVRCLNLRNPQITCTGFDRPNLYLEVRRKTGNILQDLQPFLVKTSSHWEFEGPTIIYCPSRKMTQQVTGELRKLNLSCGTYHAGMSFSTRKDIHHRFVRDEIQCVIATIAFGMGINKADIRQVIHYGAPKDMESYYQEIGRAGRDGLQSSCHVLWAPADINLNRHLLTEIRNEKFRLYKLKMMAKMEKYLHSSRCRRQIILSHFEDKQVQKASLGIMGTEKCCDNCRSRLDHCYSMDDSEDTSWDFGPQAFKLLSAVDILGEKFGIGLPILFLRGSNSQRLADQYRRHSLFGTGKDQTESWWKAFSRQLITEGFLVEVSRYNKFMKICALTKKGRNWLHKANTESQSLILQANEELCPKKLLLPSSKTVSSGTKEHCYNQVPVELSTEKKSNLEKLYSYKPCDKISSGSNISKKSIMVQSPEKAYSSSQPVISAQEQETQIVLYGKLVEARQKHANKMDVPPAILATNKILVDMAKMRPTTVENVKRIDGVSEGKAAMLAPLLEVIKHFCQTNSVQTDLFSSTKPQEEQKTSLVAKNKICTLSQSMAITYSLFQEKKMPLKSIAESRILPLMTIGMHLSQAVKAGCPLDLERAGLTPEVQKIIADVIRNPPVNSDMSKISLIRMLVPENIDTYLIHMAIEILKHGPDSGLQPSCDVNKRRCFPGSEEICSSSKRSKEEVGINTETSSAERKRRLPVWFAKGSDTSKKLMDKTKRGGLFS

SEQ ID NO: 300 - protein, 1406 aa, Homo sapiens
MSEKKLETTAQQRKCPEWMNVQNKRCAVEERKACVRKSVFEDDLPFLEFTGSIVYSYDASDCSFLSEDISMSLSDGDVVGFDMEWPPLYNRGKLGKVALIQLCVSESKCYLFHVSSMSVFPQGLKMLLENKAVKKAGVGIEGDQWKLLRDFDIKLKNFVELTDVANKKLKCTETWSLNSLVKHLLGKQLLKDKSIRCSNWSKFPLTEDQKLYAATDAYAGFIIYRNLEILDDTVQRFAINKEEEILLSDMNKQLTSISEEVMDLAKHLPHAFSKLENPRRVSILLKDISENLYSLRRMIIGSTNIETELRPSNNLNLLSFEDSTTGGVQQKQIREHEVLIHVEDETWDPTLDHLAKHDGEDVLGNKVERKEDGFEDGVEDNKLKENMERACLMSLDITEHELQILEQQSQEEYLSDIAYKSTEKHLSPNDNENDTSYVIESDEDLEMEMLKSLENLNSGTVEPTHSKCLKMERNLGLPTKEEEEDDENEANEGEEDDDKDFLWPAPNEEQVTCLKMYFGHSSFKPVQWKVIHSVLEERRDNVAVMATGYGKSLCFQYPPVYVGKIGLVISPLISLMEDQVLQLKMSNIPACFLGSAQSENVLTDIKLGKYRIVYVTPEYCSGNMGLLQQLEADIGITLIAVDEAHCISEWGHDFRDSFRKLGSLKTALPMVPIVALTATASSSIREDIVRCLNLRNPQITCTGFDRPNLYLEVRRKTGNILQDLQPFLVKTSSHWEFEGPTIIYCPSRKMTQQVTGELRKLNLSCGTYHAGMSFSTRKDIHHRFVRDEIQCVIATIAFGMGINKADIRQVIHYGAPKDMESYYQEIGRAGRDGLQSSCHVLWAPADINLNRHLLTEIRNEKFRLYKLKMMAKMEKYLHSSRCRRQIILSHFEDKQVQKASLGIMGTEKCCDNCRSRLDHCYSMDDSEDTSWDFGPQAFKLLSAVDILGEKFGIGLPILFLRGSNSQRLADQYRRHSLFGTGKDQTESWWKAFSRQLITEGFLVEVSRYNKFMKICALTKKGRNWLHKANTESQSLILQANEELCPKKLLLPSSKTVSSGTKEHCYNQVPVELSTEKKSNLEKLYSYKPCDKISSGSNISKKSIMVQSPEKAYSSSQPVISAQEQETQIVLYGKLVEARQKHANKMDVPPAILATNKILVDMAKMRPTTVENVKRIDGVSEGKAAMLAPLLEVIKHFCQTNSVQTDLFSSTKPQEEQKTSLVAKNKICTLSQSMAITYSLFQEKKMPLKSIAESRILPLMTIGMHLSQAVKAGCPLDLERAGLTPEVQKIIADVIRNPPVNSDMSKISLIRMLVPENIDTYLIHMAIEILKHGPDSGLQPSCDVNKRRCFPGSEEICSSSKRSKEEVGINTETSSAERKRRLPVWFAKGSDTSKKLMDKTKRGGLFS

SEQ ID NO: 301 - protein, 1436 aa, Homo sapiens [sequence omitted]

SEQ ID NO: 302 - protein, 1432 aa, Homo sapiens
MSEKKLETTAQQRKCPEWMNVQNKRCAVEERKACVRKSVFEDDLPFLEFTGSIVYSYDASDCSFLSEDISMSLSDGDVVGFDMEWPPLYNRGKLGKVALIQLCVSESKCYLFHVSSMSVFPQGLKMLLENKAVKKAGVGIEGDQWKLLRDFDIKLKNFVELTDVANKKLKCTETWSLNSLVKHLLGKQLLKDKSIRCSNWSKFPLTEDQKLYAATDAYAGFIIYRNLEILDDTVQRFAINKEEEILLSDMNKQLTSISEEVMDLAKHLPHAFSKLENPRRVSILLKDISENLYSLRRMIIGSTNIETELRPSNNLNLLSFEDSTTGGVQQKQIREHEVLIHVEDETWDPTLDHLAKHDGEDVLGNKVERKEDGFEDGVEDNKLKENMERACLMSLDITEHELQILEQQSQEEYLSDIAYKSTEHLSPNDNENDTSYVIESDEDLEMEMLKHLSPNDNENDTSYVIESDEDLEMEMLKSLENLNSGTVEPTHSKCLKMERNLGLPTKEEEEDDENEANEGEEDDDKDFLWPAPNEEQVTCLKMYFGHSSFKPVQWKVIHSVLEERRDNVAVMATGYGKSLCFQYPPVYVGKIGLVISPLISLMEDQVLQLKMSNIPACFLGSAQSENVLTDIKLGKYRIVYVTPEYCSGNMGLLQQLEADIGITLIAVDEAHCISEWGHDFRDSFRKLGSLKTALPMVPIVALTATASSSIREDIVRCLNLRNPQITCTGFDRPNLYLEVRRKTGNILQDLQPFLVKTSSHWEFEGPTIIYCPSRKMTQQVTGELRKLNLSCGTYHAGMSFSTRKDIHHRFVRDEIQCVIATIAFGMGINKADIRQVIHYGAPKDMESYYQEIGRAGRDGLQSSCHVLWAPADINLNRHLLTEIRNEKFRLYKLKMMAKMEKYLHSSRCRRQIILSHFEDKQVQKASLGIMGTEKCCDNCRSRLDHCYSMDDSEDTSWDFGPQAFKLLSAVDILGEKFGIGLPILFLRGSNSQRLADQYRRHSLFGTGKDQTESWWKAFSRQLITEGFLVEVSRYNKFMKICALTKKGRNWLHKANTESQSLILQANEELCPKKFLLPSSKTVSSGTKEHCYNQVPVELSTEKKSNLEKLYSYKPCDKISSGSNISKKSIMVQSPEKAYSSSQPVISAQEQETQIVLYGKLVEARQKHANKMDVPPAILATNKILVDMAKMRPTTVENVKRIDGVSEGKAAMLAPLLEVIKHFCQTNSVQTDLFSSTKPQEEQKTSLVAKNKICTLSQSMAITYSLFQEKKMPLKSIAESRILPLMTIGMHLSQAVKAGCPLDLERAGLTPEVQKIIADVIRNPPVNSDMSKISLIRMLVPENIDTYLIHMAIEILKHGPDSGLQPSCDVNKRRCFPGSEEICSSSKRSKEEVGINTETSSAERKRRLPVWFAKGSDTSKKLMDKTKRGGLFS

SEQ ID NO: 303 - protein, 638 aa, Homo sapiens
MILFKQATYFISLFATVSCGCLTQLYENAFFRGGDVASMYTPNAQYCQMRCTFHPRCLLFSFLPASSINDMEKRFGCFLKDSVTGTLPKVHRTGAVSGHSLKQCGHQISACHRDIYKGVDMRGVNFNVSKVSSVEECQKRCTSNIRCQFFSYATQTFHKAEYRNNCLLKYSPGGTPTAIKVLSNVESGFSLKPCALSEIGCHMNIFQHLAFSDVDVARVLTPDAFVCRTICTYHPNCLFFTFYTNVWKIESQRNVCLLKTSESGTPSSSTPQENTISGYSLLTCKRTLPEPCHSKIYPGVDFGGEELNVTFVKGVNVCQETCTKMIRCQFFTYSLLPEDCKEEKCKCFLRLSMDGSPTRIAYGTQGSSGYSLRLCNTGDNSVCTTKTSTRIVGGTNSSWGEWPWQVSLQVKLTAQRHLCGGSLIGHQWVLTAAHCFDGLPLQDVWRIYSGILNLSDITKDTPFSQIKEIIIHQNYKVSEGNHDIALIKLQAPLNYTEFQKPICLPSKGDTSTIYTNCWVTGWGFSKEKGEIQNILQKVNIPLVTNEECQKRYQDYKITQRMVCAGYKEGGKDACKGDSGGPLVCKHNGMWRLVGITSWGEGCARREQPGVYTKVAEYMDWILEKTQSSDGKAQMQSPA

SEQ ID NO: 304 - protein, 635 aa, Homo sapiens
MILFKQATYFISLFATVSCGCLTQLYENAFFRGGDVASMYTPNAQYCQMRCTFHPRCLLFSFLPASSINDMEKRFGCFLKDSVTGTLPKVHRTGAVSGHSLKQCGHQISACHRDIYKGVDMRGVNFNVSKVSSVEECQKRCTSNIRCQFFSYATQTFHKAEYRNNCLLKYSPGGTPTAIKVLSNVESGFSLKPCALSEIGCHMNIFQHLAFSDVDVARVLTPDAFVCRTICTYHPNCLFFTFYTNVWKIENVCLLKTSESGTPSSSTPQENTISGYSLLTCKRTLPEPCHSKIYPGVDFGGEELNVTFVKGVNVCQETCTKMIRCQFFTYSLLPEDCKEEKCKCFLRLSMDGSPTRIAYGTQGSSGYSLRLCNTGDNSVCTTKTSTRIVGGTNSSWGEWPWQVSLQVKLTAQRHLCGGSLIGHQWVLTAAHCFDGLPLQDVWRIYSGILNLSDITKDTPFSQIKEIIIHQNYKVSEGNHDIALIKLQAPLNYTEFQKPICLPSKGDTSTIYTNCWVTGWGFSKEKGEIQNILQKVNIPLVTNEECQKRYQDYKITQRMVCAGYKEGGKDACKGDSGGPLVCKHNGMWRLVGITSWGEGCARREQPGVYTKVAEYMDWILEKTQSSDGKAQMQSPA

SEQ ID NO: 305 - protein, 156 aa, Homo sapiens
MPKCRAAGEAHAERAGSAHSPPLQGVYWISCQSTKMPGGLMMPGEPPWHSRGKGLTPRGDLERDIPYPTPSARLCTSGSRELTGRGWSSPEAMKTVTMMMVVEMQALTQLSLCDCLCDSLIVVVTKMASLRGRTLGVVAGSATPRDDGGGDRGSPL

SEQ ID NO: 306 - protein, 128 aa, Homo sapiens [sequence omitted]

SEQ ID NO: 307 - protein, 392 aa, Homo sapiens
MMWRIYVSLESVVGLDLYGQCVCASCVSCYWPGLGQEPSTLGPTPCVLGSPRGSVRDDLGTKEMMGASSLTAWISVPFSRTLKDSLEQDLNNMNKFLEKLRPLSGSEAPRLPQDPVGMRRQLQEELEEVKARLQPYMAEAHELVGWNLEGLRQQLKPYTMDLMEQVALRVQELQEQLRVVGEDTKAQLLGGVDEAWALLQGLQSRVVHHTGRFKELFHPYAESLVSGIGRHVQELHRSVAPHAPASPARLSRCVQVLSRKLTLKAKALHARIQQNLDQLREELSRAFAGTGTEEGAGPDPQMLSEEVRQRLQAFRQDTYLQIAAFTRAIDQETEEVQQQLAPPPPGHSAFAPEFQQTDSGKVLSKLQARLDDLWEDITHSLHDQGHSHLGDP

SEQ ID NO: 308 - protein, 366 aa, Homo sapiens
MASMAAVLTWALALLSAFSATQARKGFWDYFSQTSGDKGRVEQIHQQKMAREPATLKDSLEQDLNNMNKFLEKLRPLSGSEAPRLPQDPVGMRRQLQEELEEVKARLQPYMAEAHELVGWNLEGLRQQLKPYTMDLMEQVALRVQELQEQLRVVGEDTKAQLLGGVDEAWALLQGLQSRVVHHTGRFKELFHPYAESLVSGIGRHVQELHRSVAPHAPASPARLSRCVQVLSRKLTLKAKALHARIQQNLDQLREELSRAFAGTGTEEGAGPDPQMLSEEVRQRLQAFRQDTYLQIAAFTRAIDQETEEVQQQLAPPPPGHSAFAPEFQQTDSGKVLSKLQARLDDLWEDITHSLHDQGHSHLGDP

SEQ ID NO: 309 - protein, 631 aa, Homo sapiens
MSEAASQGLRAAARSVWAGTDRRGCRHRRPVPLCSGTALSQCPRFPRRLHAARLGNMLGVLVLGALALAGLGFPAPAEPQPGGSQCVEHDCFALYPGPATFLNASQICDGLRGHLMTVRSSVAADVISLLLNGDGGVGRRRLWIGLQLPPGCGDPKRLGPLRGFQWVTGDNNTSYSRWARLDLNGAPLCGPLCVAVSAAEATVPSEPIWEEQQCEVKADGFLCEFHFPATCRPLAVEPGAAAAAVSITYGTPFAARGADFQALPVGSSAAVAPLGLQLMCTAPPGAVQGHWAREAPGAWDCSVENGGCEHACNAIPGAPRCQCPAGAALQADGRSCTASATQSCNDLCEHFCVPNPDQPGSYSCMCETGYRLAADQHRCEDVDDCILEPSPCPQRCVNTQGGFECHCYPNYDLVDGECVEPVDPCFRANCEYQCQPLNQTSYLCVCAEGFAPIPHEPHRCQMFCNQTACPADCDPNTQASCECPEGYILDDGFICTDIDECENGGFCSGVCHNLPGTFECICGPDSALARHIGTDCDSGKVDGGDSGSGEPPPSPTPGSTLTPPAVGLVHSGLLIGISIASLCLVVALLALLCHLRKKQGAARAKMEYKCAAPSKEVVLQHVRTERTPQRL

SEQ ID NO: 310 - protein, 342 aa, Homo sapiens
MQAVDNLTSAPGNTSLCTRDYKITQVLFPLLYTVLFFVGLITNGLAMRIFFQIRSKSNFIIFLKNTVISDLLMILTFPFKILSDAKLGTGPLRTFVCQVTSVIFYFTMYISISFLGLITIDRYQKTTRPFKTSNPKNLLGAKILSVVIWAFMFLLSLPNMILTNRQPRDKNVKKCSFLKSEFGLVWHEIVNYICQVIFWINFLIVIVCYTLITKELYRSYVRTRGVGKVPRKKVNVKVFIIIAVFFICFVPFHFARIPYTLSQTRDVFDCTAENTLFYVKESTLWLTSLNACLDPFIYFFLCKSFRNSLISMLKCPNSATSLSQDNRKKEQDGGDPNEETPM

SEQ ID NO: 311 - protein, 342 aa, Homo sapiens; identical to SEQ ID NO: 310

SEQ ID NO: 312 - protein, 164 aa, Homo sapiens
MWPPGSASQPPPSPAAATGLHPAARPVSLQCRLSMCPARSLLLVATLVLLDHLSLARNLPVATPDPGMFPCLHHSQNLLRAVSNMLQKARQTLEFYPCTSEEIDHEDITKDKTSTVEACLPLELTKNESCLNSRETSFITVSQKMKSFSLYDEFISLMSDYFFL

SEQ ID NO: 313 - protein, 253 aa, Homo sapiens
MWPPGSASQPPPSPAAATGLHPAARPVSLQCRLSMCPARSLLLVATLVLLDHLSLARNLPVATPDPGMFPCLHHSQNLLRAVSNMLQKARQTLEFYPCTSEEIDHEDITKDKTSTVEACLPLELTKNESCLNSRETSFITNGSCLASRKTSFMMALCLSSIYEDLKMYQVEFKTMNAKLLMDPKRQIFLDQNMLAVIDELMQALNFNSETVPQKSSLEEPDFYKTKIKLCILLHAFRIRAVTIDRVMSYLNAS

SEQ ID NO: 314 - protein, 4655 aa, Homo sapiens [sequence omitted]

SEQ ID NO: 315 - protein, 205 aa, Homo sapiens [sequence omitted]

SEQ ID NO: 316 - protein, 215 aa, Homo sapiens
MEWLLVTRTVLIMDKQNSQMNASHPETNLPVGYPPQYPPTAFQGPPGYSGYPGPQVSYPPPPAGHSGPGPAGFPVPNQPVYNQPVYNQPVGAAGVPWMPAPQPPLNCPPGLEYLSQIDQILIHQQIELLEVLTGFETNNKYEIKNSFGQRVYFAAEDTDCCTRNCCGPSRPFTLRIIDNMGQEVITLERPLRCSSCCCPCCLQEVCDQLPGHFVK

SEQ ID NO: 317 - protein, 77 aa, Homo sapiens
LLRRLRSSCARQSRGAEEEAIAWPRLSGPCLARERKQRQPENCFNHGQTKLTDECFSPGNKLASWVSSSVSTDSIPR

SEQ ID NO: 318 - protein, 119 aa, Homo sapiens
MDKQNSQMNASHPETNLPVGYPPQYPPTAFQGPPGYSGYPGPQVSYPPPPAGHSGPGPAGFPVPNQPVYNQPVYNQPVGAAGVPWMPAPQPPLNCPPGLEYLSQIDQILIHQQIELLED

SEQ ID NO: 319 - protein, 128 aa, Homo sapiens
MDKQNSQMNASHPETNLPVGYPPQYPPTAFQGPPGYSGYPGPQVSYPPPPAGHSGPGPAGFPVPNQPVYNQPVYNQPVGAAGVPWMPAPQPPLNCPPGLEYLSQVISKTQNTHKKQNCASSLLNQISK

SEQ ID NO: 320 - protein, 318 aa, Homo sapiens
MDKQNSQMNASHPETNLPVGYPPQYPPTAFQGPPGYSGYPGPQVSYPPPPAGHSGPGPAGFPVPNQPVYNQPVYNQPVGAAGVPWMPAPQPPLNCPPGLEYLSQIDQILIHQQIELLEVLTGFETNNKYEIKNSFGQRVYFAAEDTDCCTRNCCGPSRPFTLRIIDNMGQEVITLERPLRCSSCCCPCCLQEIEIQAPPGVPIGYVIQTWHPCLPKFTIQNEKREDVLKISGPCVVCSCCGDVDFEIKSLDEQCVVGKISKHWTGILREAFTDADNFGIQFPLDLDVKMKAVMIGACFLIDFMFFESTGSQEQKSGVW

SEQ ID NO: 321 - protein, 186 aa, Homo sapiens [sequence omitted]

SEQ ID NO: 322 - protein, 311 aa, Homo sapiens
MNASHPETNLPVGYPPQYPPTAFQGPPGYSGYPGPQVSYPPPPAGHSGPGPAGFPVPNQPVYNQPVYNQPVGAAGVPWMPAPQPPLNCPPGLEYLSQIDQILIHQQIELLEVLTGFETNNKYEIKNSFGQRVYFAAEDTDCCTRNCCGPSRPFTLRIIDNMGQEVITLERPLRCSSCCCPCCLQEIEIQAPPGVPIGYVIQTWHPCLPKFTIQNEKREDVLKISGPCVVCSCCGDVDFEIKSLDEQCVVGKISKHWTGILREAFTDADNFGIQFPLDLDVKMKAVMIGACFLIDFMFFESTGSQEQKSGVW

SEQ ID NO: 323 - protein, 130 aa, Homo sapiens
MGNPQRWASPIHTPPLGPEILRAMPEALGLRPDPATSVPSALSQRFRVLAQELSEKPGRNPRNGPRSSLFTLHHGIPVPELDSLPPTPYLSPWTLLEEKSLQGACCQRVSLPWEWRCRDRVFCCYCLFVF

SEQ ID NO: 324 - protein, 130 aa, Homo sapiens; identical to SEQ ID NO: 323

SEQ ID NO: 325 - protein, 365 aa, Homo sapiens [sequence omitted]

SEQ ID NO: 326 - protein, 365 aa, Homo sapiens [sequence omitted]

SEQ ID NO: 327 - protein, 219 aa, Homo sapiens
MTLSPLLLFLPPLLLLLDVPTAAVQASPLQALDFFGNGPPVNYKTGNLYLRGPLKKSNAPLVNVTLYYEALCGGCRAFLIRELFPTWLLVMEILNVTLVPYGNAQEQNVSGRWEFKCQHGEEECKFNKVECLQLYAPGLSPDTIMECAMGDRGMQLMHANAQRTDALQPPHEYVPWVTVNGKPLEDQTQLLTLVCQLYQGKKPDVCPSSTSSLRSVCFK

SEQ ID NO: 328 - protein, 238 aa, Homo sapiens
MTLSPLLLFLPPLLLLLDVPTAAVQASPLQALDFFGNGPPVNYKTGNLYLRGPLKKSNAPLVNVTLYYEALCGGCRAFLIRELFPTWLLVMEILNVTLVPYGNAQEQNVSGRWEFKCQHGEEECKFNKVEACVLDELDMELAFLTIVCMEEFEDMERSLPLCLQLYAPGLSPDTIMECAMGDRGMQLMHANAQRTDALQPPHEYVPWVTVNGVRIFLALSLTLIVPWSQGWTRQRDQR

SEQ ID NO: 329 - protein, 250 aa, Homo sapiens
MTLSPLLLFLPPLLLLLDVPTAAVQASPLQALDFFGNGPPVNYKTGNLYLRGPLKKSNAPLVNVTLYYEALCGGCRAFLIRELFPTWLLVMEILNVTLVPYGNAQEQNVSGRWEFKCQHGEEECKFNKVEACVLDELDMELAFLTIVCMEEFEDMERSLPLCLQLYAPGLSPDTIMECAMGDRGMQLMHANAQRTDALQPPHEYVPWVTVNGKPLEDQTQLLTLVCQLYQGKKPDVCPSSTSSLRSVCFK

SEQ ID NO: 330 - protein, 76 aa, Homo sapiens
MDGRESAFPKLKYLGQDNSLAAQSPPWRTQIRMLRPENQRLGPRPQPSQHDTDASLGEQGLSASSGVVCILLYLML

SEQ ID NO: 331 - protein, 76 aa, Homo sapiens; identical to SEQ ID NO: 330

SEQ ID NO: 332 - protein, 4485 aa, Homo sapiens [sequence omitted]

SEQ ID NO: 333 - protein, 2641 aa, Homo sapiens [sequence omitted]

SEQ ID NO: 334 - protein, 423 aa, Homo sapiens [sequence omitted]

SEQ ID NO: 335 - protein, 3623 aa, Homo sapiens [sequence omitted]

SEQ ID NO: 336 - protein, 535 aa, Homo sapiens
MDKFWWHAAWGLCLVPLSLAQIDLNITCRFAGVFHVEKNGRYSISRTEAADLCKAFNSTLPTMAQMEKALSIGFETCRYGFIEGHVVIPRIHPNSICAANNTGVYILTSNTSQYDTYCFNASAPPEEDCTSVTDLPNAFDGPITITIVNRDGTRYVQKGEYRTNPEDIYPSNPTDDDVSSGSSSERSSTSGGYIFYTFSTVHPIPDEDSPWITDSTDRIPATSTSSNTISAGWEPNEENEDERDRHLSFSGSGIDDDEDFISSTNMDSSHSITLQPTANPNTGLVEDLDRTGPLSMTTQQSNSQSFSTSHEGLEEDKDHPTTSTLTSSNRNDVTGGRRDPNHSEGSTTLLEGYTSHYPHTKESRTFIPVTSAKTGSFGVTAVTVGDSNSNVNRSLSGDQDTFHPSGGSHTTHGSESDGHSHGSQEGGANTTSGPIRTPQIPEWLIILASLLALALILAVCIAVNSRRRCGQKKKLVINSGNGAVEDRKPSGLNGEASKSQEMVHLVNKESSETPDQFMTADETRNLQNVDMKIGV

SEQ ID NO: 337 - protein, 425 aa, Homo sapiens
MDKFWWHAAWGLCLVPLSLAQIDLNITCRFAGVFHVEKNGRYSISRTEAADLCKAFNSTLPTMAQMEKALSIGFETCRYGFIEGHVVIPRIHPNSICAANNTGVYILTSNTSQYDTYCFNASAPPEEDCTSVTDLPNAFDGPITITIVNRDGTRYVQKGEYRTNPEDIYPSNPTDDDVSSGSSSERSSTSGGYIFYTFSTVHPIPDEDSPWITDSTDRIPATNMDSSHSITLQPTANPNTGLVEDLDRTGPLSMTTQQSNSQSFSTSHEGLEEDKDHPTTSTLTSSRDQDTFHPSGGSHTTHGSESDGHSHGSQEGGANTTSGPIRTPQIPEWLIILASLLALALILAVCIAVNSRRRCGQKKKLVINSGNGAVEDRKPSGLNGEASKSQEMVHLVNKESSETPDQFMTADETRNLQNVDMKIGV

SEQ ID NO: 338 - protein, 742 aa, Homo sapiens [sequence omitted]

SEQ ID NO: 339 - protein, 742 aa, Homo sapiens [sequence omitted]

SEQ ID NO: 340 - protein, 361 aa, Homo sapiens
MDKFWWHAAWGLCLVPLSLAQIDLNITCRFAGVFHVEKNGRYSISRTEAADLCKAFNSTLPTMAQMEKALSIGFETCRYGFIEGHVVIPRIHPNSICAANNTGVYILTSNTSQYDTYCFNASAPPEEDCTSVTDLPNAFDGPITITIVNRDGTRYVQKGEYRTNPEDIYPSNPTDDDVSSGSSSERSSTSGGYIFYTFSTVHPIPDEDSPWITDSTDRIPATRDQDTFHPSGGSHTTHGSESDGHSHGSQEGGANTTSGPIRTPQIPEWLIILASLLALALILAVCIAVNSRRRCGQKKKLVINSGNGAVEDRKPSGLNGEASKSQEMVHLVNKESSETPDQFMTADETRNLQNVDMKIGV

SEQ ID NO: 341 - protein, 668 aa, Homo sapiens
MDKFWWHAAWGLCLVPLSLAQIDLNITCRFAGVFHVEKNGRYSISRTEAADLCKAFNSTLPTMAQMEKALSIGFETCRYGFIEGHVVIPRIHPNSICAANNTGVYILTSNTSQYDTYCFNASAPPEEDCTSVTDLPNAFDGPITITIVNRDGTRYVQKGEYRTNPEDIYPSNPTDDDVSSGSSSERSSTSGALMSTSATATETATKRQETWDWFSWLFLPSESKNHLHTTTQMAGTSSNTISAGWEPNEENEDERDRHLSFSGSGIDDDEDFISSTISTTPRAFDHTKQNQDWTQWNPSHSNPEVLLQTTTRMTDVDRNGTTAYEGNWNPEAHPPLIHHEHHEEEETPHSTSTTASAHTSHPMQGRTTPSPEDSSWTDFFNPISHPMGRGHQAGRRMDMDSSHSITLQPTANPNTGLVEDLDRTGPLSMTTQQSNSQSFSTSHEGLEEDKDHPTTSTLTSSNRNDVTGGRRDPNHSEGSTTLLEGYTSHYPHTKESRTFIPVTSAKTGSFGVTAVTVGDSNSNVNRSLSGDQDTFHPSGGSHTTHGSESDGHSHGSQEGGANTTSGPIRTPQIPEWLIILASLLALALILAVCIAVNSRRRCGQKKKLVINSGNGAVEDRKPSGLNGEASKSQEMVHLVNKESSETPDQFMTADETRNLQNVDMKIGV

SEQ ID NO: 342 - protein, 139 aa, Homo sapiens
MDKFWWHAAWGLCLVPLSLAQIDLNITCRFAGVFHVEKNGRYSISRTEAADLCKAFNSTLPTMAQMEKALSIGFETCSLHCSQQSKKVWAEEKASDQQWQWSCGGQKAKWTQRRGQQVSGNGAFGEQGVVRNSRPVYDS

SEQ ID NO: 343 - protein, 493 aa, Homo sapiens
MDKFWWHAAWGLCLVPLSLAQIDLNITCRFAGVFHVEKNGRYSISRTEAADLCKAFNSTLPTMAQMEKALSIGFETCRYGFIEGHVVIPRIHPNSICAANNTGVYILTSNTSQYDTYCFNASAPPEEDCTSVTDLPNAFDGPITITIVNRDGTRYVQKGEYRTNPEDIYPSNPTDDDVSSGSSSERSSTSGGYIFYTFSTVHPIPDEDSPWITDSTDRIPATNMDSSHSITLQPTANPNTGLVEDLDRTGPLSMTTQQSNSQSFSTSHEGLEEDKDHPTTSTLTSSNRNDVTGGRRDPNHSEGSTTLLEGYTSHYPHTKESRTFIPVTSAKTGSFGVTAVTVGDSNSNVNRSLSGDQDTFHPSGGSHTTHGSESDGHSHGSQEGGANTTSGPIRTPQIPEWLIILASLLALALILAVCIAVNSRRRCGQKKKLVINSGNGAVEDRKPSGLNGEASKSQEMVHLVNKESSETPDQFMTADETRNLQNVDMKIGV

SEQ ID NO: 344 - protein, 691 aa, Homo sapiens
MDKFWWHAAWGLCLVPLSLAQIDLNITCRFAGVFHVEKNGRYSISRTEAADLCKAFNSTLPTMAQMEKALSIGFETCRYGFIEGHVVIPRIHPNSICAANNTGVYILTSNTSQYDTYCFNASAPPEEDCTSVTDLPNAFDGPITITIVNRDGTRYVQKGEYRTNPEDIYPSNPTDDDVSSGSSSERSSTSGGYIFYTFSTVHPIPDEDSPWITDSTDRIPATTLMSTSATATETATKRQETWDWFSWLFLPSESKNHLHTTTQMAAGWEPNEENEDERDRHLSFSGSGIDDDEDFISSTISTTPRAFDHTKQNQDWTQWNPSHSNPEVLLQTTTRMTDVDRNGTTAYEGNWNPEAHPPLIHHEHHEEEETPHSTSTTASAHTSHPMQGRTTPSPEDSSWTDFFNPISHPMGRGHQAGRRMDMDSSHSITLQPTANPNTGLVEDLDRTGPLSMTTQQSNSQSFSTSHEGLEEDKDHPTTSTLTSSNRNDVTGGRRDPNHSEGSTTLLEGYTSHYPHTKESRTFIPVTSAKTGSFGVTAVTVGDSNSNVNRSLSGDQDTFHPSGGSHTTHGSESDGHSHGSQEGGANTTSGPIRTPQIPEWLIILASLLALALILAVCIAVNSRRRCGQKKKLVINSGNGAVEDRKPSGLNGEASKSQEMVHLVNKESSETPDQFMTADETRNLQNVDMKIGV

SEQ ID NO: 345 - protein, 395 aa, Homo sapiens
MDKFWWHAAWGLCLVPLSLAQIDLNITCRFAGVFHVEKNGRYSISRTEAADLCKAFNSTLPTMAQMEKALSIGFETCRYGFIEGHVVIPRIHPNSICAANNTGVYILTSNTSQYDTYCFNASAPPEEDCTSVTDLPNAFDGPITITIVNRDGTRYVQKGEYRTNPEDIYPSNPTDDDVSSGSSSERSSTSGGYIFYTFSTVHPIPDEDSPWITDSTDRIPATNMDSSHSITLQPTANPNTGLVEDLDRTGPLSMTTRDQDTFHPSGGSHTTHGSESDGHSHGSQEGGANTTSGPIRTPQIPEWLIILASLLALALILAVCIAVNSRRRCGQKKKLVINSGNGAVEDRKPSGLNGEASKSQEMVHLVNKESSETPDQFMTADETRNLQNVDMKIGV

SEQ ID NO: 346 - protein, 95 aa, Homo sapiens [sequence omitted]

SEQ ID NO: 347 - protein, 412 aa, Homo sapiens
MPLQLLLLLILLGPGNSLQLWDTWADEAEKALGPLLARDRRQATEYEYLDYDFLPETEPPEMLRNSTDTTPLTGPGTPESTTVEPAARRSTGLDAGGAVTELTTELANMGNLSTDSAAMEIQTTQPAATEAQTTQPVPTEAQTTPLAATEAQTTRLTATEAQTTPLAATEAQTTPPAATEAQTTQPTGLEAQTTAPAAMEAQTTAPAAMEAQTTPPAAMEAQTTQTTAMEAQTTAPEATEAQTTQPTATEAQTTPLAAMEALSTEPSATEALSMEPTTKRGLFIPFSVSSVTHKGIPMAASNLSVNYPVGAPDHISVKQCLLAILILALVATIFFVCTVVLAVRLSRKGHMYPVRNYSPTEMVCISSLLPDGGEGPSATANGGLSKAKSPGLTPEPREDREGDDLTLHSFLP

SEQ ID NO: 348 - protein, 994 aa, Homo sapiens [sequence omitted]

SEQ ID NO: 349 - protein, 1027 aa, Homo sapiens [sequence omitted]

SEQ ID NO: 350 - protein, 994 aa, Homo sapiens [sequence omitted]

SEQ ID NO: 351 - protein, 994 aa, Homo sapiens [sequence omitted]

SEQ ID NO: 352 - protein, 1156 aa, Homo sapiens
MVLLEDSGSADFRRHFVNLSPFTITVVLLLSACFVTSSLGGTDKELRLVDGENKCSGRVEVKVQEEWGTVCNNGWSMEAVSVICNQLGCPTAIKAPGWANSSAGSGRIWMDHVSCRGNESALWDCKHDGWGKHSNCTHQQDAGVTCSDGSNLEMRLTRGGNMCSGRIEIKFQGRWGTVCDDNFNIDHASVICRQLECGSAVSFSGSSNFGEGSGPIWFDDLICNGNESALWNCKHQGWGKHNCDHAEDAGVICSKGADLSLRLVDGVTECSGRLEVRFQGEWGTICDDGWDSYDAAVACKQLGCPTAVTAIGRVNASKGFGHIWLDSVSCQGHEPAVWQCKHHEWGKHYCNHNEDAGVTCSDGSDLELRLRGGGSRCAGTVEVEIQRLLGKVCDRGWGLKEADVVCRQLGCGSALKTSYQVYSKIQATNTWLFLSSCNGNETSLWDCKNWQWGGLTCDHYEEAKITCSAHREPRLVGGDIPCSGRVEVKHGDTWGSICDSDFSLEAASVLCRELQCGTVVSILGGAHFGEGNGQIWAEEFQCEGHESHLSLCPVAPRPEGTCSHSRDVGVVCSRYTEIRLVNGKTPCEGRVELKTLGAWGSLCNSHWDIEDAHVLCQQLKCGVALSTPGGARFGKGNGQIWRHMFHCTGTEQHMGDCPVTALGASLCPSEQVASVICSGNQSQTLSSCNSSSLGPTRPTIPEESAVACIESGQLRLVNGGGRCAGRVEIYHEGSWGTICDDSWDLSDAHVVCRQLGCGEAINATGSAHFGEGTGPIWLDEMKCNGKESRIWQCHSHGWGQQNCRHKEDAGVICSEFMSLRLTSEASREACAGRLEVFYNGAWGTVGKSSMSETTVGVVCRQLGCADKGKINPASLDKAMSIPMWVDNVQCPKGPDTLWQCPSSPWEKRLASPSEETWITCDNKIRLQEGPTSCSGRVEIWHGGSWGTVCDDSWDLDDAQVVCQQLGCGPALKAFKEAEFGQGTGPIWLNEVKCKGNESSLWDCPARRWGHSECGHKEDAAVNCTDISVQKTPQKATTGRSSRQSSFIAVGILGVVLLAIFVALFFLTKKRRQRQRLAVSSRGENLVHQIQYREMNSCLNADDLDLMNSSGLWVLGGSIAQGFRSVAAVEAQTFYFDKQLKKSKNVIGSLDAYNGQE

SEQ ID NO: 353 - protein, 1348 aa, Homo sapiens [sequence omitted]

SEQ ID NO: 354 - protein, 642 aa, Homo sapiens [sequence omitted]

SEQ ID NO: 355 - protein, 1341 aa, Homo sapiens
MWTPPESAVTGYRVDVIPVNLPGEHGQRLPISRNTFAEVTGLSPGVTYYFKVFAVSHGRESKPLTAQQTTKLDAPTNLQFVNETDSTVLVRWTPPRAQITGYRLTVGLTRRGQPRQYNVGPSVSKYPLRNLQPASEYTVSLVAIKGNQESPKATGVFTTLQPGSSIPPYNTEVTETTIVITWTPAPRIGFKLGVRPSQGGEAPREVTSDSGSIVVSGLTPGVEYVYTIQVLRDGQERDAPIVNKVVTPLSPPTNLHLEANPDTGVLTVSWERSTTPDITGYRITTTPTNGQQGNSLEEVVHADQSSCTFDNLSPGLEYNVSVYTVKDDKESVPISDTIIPAVPPPTDLRFTNIGPDTMRVTWAPPPSIDLTNFLVRYSPVKNEEDVAELSISPSDNAVVLTNLLPGTEYVVSVSSVYEQHESTPLRGRQKTGLDSPTGIDFSDITANSFTVHWIAPRATITGYRIRHHPEHFSGRPREDRVPHSRNSITLTNLTPGTEYVVSIVALNGREESPLLIGQQSTVSDVPRDLEVVAATPTSLLISWDAPAVTVRYYRITYGETGGNSPVQEFTVPGSKSTATISGLKPGVDYTITVYAVTGRGDSPASSKPISINYRTEIDKPSQMQVTDVQDNSISVKWLPSSSPVTGYRVTTTPKNGPGPTKTKTAGPDQTEMTIEGLQPTVEYVVSVYAQNPSGESQPLVQTAVTNIDRPKGLAFTDVDVDSIKIAWESPQGQVSRYRVTYSSPEDGIHELFPAPDGEEDTAELQGLRPGSEYTVSVVALHDDMESQPLIGTQSTAIPAPTDLKFTQVTPTSLSAQWTPPNVQLTGYRVRVTPKEKTGPMKEINLAPDSSSVVVSGLMVATKYEVSVYALKDTLTSRPAQGVVTTLENVSPPRRARVTDATETTITISWRTKTETITGFQVDAVPANGQTPIQRTIKPDVRSYTITGLQPGTDYKIYLYTLNDNARSSPVVIDASTAIDAPSNLRFLATTPNSLLVSWQPPRARITGYIIKYEKPGSPPREVVPRPRPGVTEATITGLEPGTEYTIYVIALKNNQKSEPLIGRKKTGQEALSQTTISWAPFQDTSEYIISCHPVGTDEEPLQFRVPGTSTSATLTGLTRGATYNIIVEALKDQQRHKVREEVVTVGNSVNEGLNQPTDDSCFDPYTVSHYAVGDEWERMSESGFKLLCQCLGFGSGHFRCDSSRWCHDNGVNYKIGEKWDRQGENGQMMSCTCLGNGKGEFKCDPHEATCYDDGKTYHVGEQWQKEYLGAICSCTCFGGQRGWRCDNCRRPGGEPSPEGTTGQSYNQYSQRYHQRTNTNVNCPIECFMPLDVQADREDSRE

SEQ ID NO: 356 - protein, 984 aa, Homo sapiens [sequence omitted]

SEQ ID NO: 357 - protein, 2355 aa, Homo sapiens [sequence omitted]

SEQ ID NO: 358 - protein, 1315 aa, Homo sapiens
MWTPPESAVTGYRVDVIPVNLPGEHGQRLPISRNTFAEVTGLSPGVTYYFKVFAVSHGRESKPLTAQQTTKLDAPTNLQFVNETDSTVLVRWTPPRAQITGYRLTVGLTRRGQPRQYNVGPSVSKYPLRNLQPASEYTVSLVAIKGNQESPKATGVFTTLQPGSSIPPYNTEVTETTIVITWTPAPRIGFKLGVRPSQGGEAPREVTSDSGSIVVSGLTPGVEYVYTIQVLRDGQERDAPIVNKVVTPLSPPTNLHLEANPDTGVLTVSWERSTTPDITGYRITTTPTNGQQGNSLEEVVHADQSSCTFDNLSPGLEYNVSVYTVKDDKESVPISDTIIPAVPPPTDLRFTNIGPDTMRVTWAPPPSIDLTNFLVRYSPVKNEEDVAELSISPSDNAVVLTNLLPGTEYVVSVSSVYEQHESTPLRGRQKTGLDSPTGIDFSDITANSFTVHWIAPRATITGYRIRHHPEHFSGRPREDRVPHSRNSITLTNLTPGTEYVVSIVALNGREESPLLIGQQSTVSDVPRDLEVVAATPTSLLISWDAPAVTVRYYRITYGETGGNSPVQEFTVPGSKSTATISGLKPGVDYTITVYAVTGRGDSPASSKPISINYRTEIDKPSQMQVTDVQDNSISVKWLPSSSPVTGYRVTTTPKNGPGPTKTKTAGPDQTEMTIEGLQPTVEYVVSVYAQNPSGESQPLVQTAVTTIPAPTDLKFTQVTPTSLSAQWTPPNVQLTGYRVRVTPKEKTGPMKEINLAPDSSSVVVSGLMVATKYEVSVYALKDTLTSRPAQGVVTTLENVSPPRRARVTDATETTITISWRTKTETITGFQVDAVPANGQTPIQRTIKPDVRSYTITGLQPGTDYKIYLYTLNDNARSSPVVIDASTAIDAPSNLRFLATTPNSLLVSWQPPRARITGYIIKYEKPGSPPREVVPRPRPGVTEATITGLEPGTEYTIYVIALKNNQKSEPLIGRKKTVQKTPFVTHPGYDTGNGIQLPGTSGQQPSVGQQMIFEEHGFRRTTPPTTATPIRHRPRPYPPNVGQEALSQTTISWAPFQDTSEYIISCHPVGTDEEPLQFRVPGTSTSATLTGLTRGATYNIIVEALKDQQRHKVREEVVTVGNSVNEGLNQPTDDSCFDPYTVSHYAVGDEWERMSESGFKLLCQCLGFGSGHFRCDSSRWCHDNGVNYKIGEKWDRQGENGQMMSCTCLGNGKGEFKCDPHEATCYDDGKTYHVGEQWQKEYLGAICSCTCFGGQRGWRCDNCRRPGGEPSPEGTTGQSYNQYSQRYHQRTNTNVNCPIECFMPLDVQADREDSRE

SEQ ID NO: 359 - protein, 657 aa, Homo sapiens [sequence omitted]

SEQ ID NO: 360 - protein, 2386 aa, Homo sapiens [sequence omitted]

SEQ ID NO: 361 - protein, 847 aa, Homo sapiens
MRVTWAPPPSIDLTNFLVRYSPVKNEEDVAELSISPSDNAVVLTNLLPGTEYVVSVSSVYEQHESTPLRGRQKTGLDSPTGIDFSDITANSFTVHWIAPRATITGYRIRHHPEHFSGRPREDRVPHSRNSITLTNLTPGTEYVVSIVALNGREESPLLIGQQSTVSDVPRDLEVVAATPTSLLISWDAPAVTVRYYRITYGETGGNSPVQEFTVPGSKSTATISGLKPGVDYTITVYAVTGRGDSPASSKPISINYRTEIDKPSQMQVTDVQDNSISVKWLPSSSPVTGYRVTTTPKNGPGPTKTKTAGPDQTEMTIEGLQPTVEYVVSVYAQNPSGESQPLVQTAVTNIDRPKGLAFTDVDVDSIKIAWESPQGQVSRYRVTYSSPEDGIHELFPAPDGEEDTAELQGLRPGSEYTVSVVALHDDMESQPLIGTQSTAIPAPTDLKFTQVTPTSLSAQWTPPNVQLTGYRVRVTPKEKTGPMKEINLAPDSSSVVVSGLMVATKYEVSVYALKDTLTSRPAQGVVTTLENVSPPRRARVTDATETTITISWRTKTETITGFQVDAVPANGQTPIQRTIKPDVRSYTITGLQPGTDYKIYLYTLNDNARSSPVVIDASTAIDAPSNLRFLATTPNSLLVSWQPPRARITGYIIKYEKPGSPPREVVPRPRPGVTEATITGLEPGTEYTIYVIALKNNQKSEPLIGRKKTGWCHDNGVNYKIGEKWDRQGENGQMMSCTCLGNGKGEFKCDPHEATCYDDGKTYHVGEQWQKEYLGAICSCTCFGGQRGWRCDNCRRPGGEPSPEGTTGQSYNQYSQRYHQRTNTNVNCPIECFMPLDVQADREDSRE

SEQ ID NO: 362 - protein, 1286 aa, Homo sapiens
MWTPPESAVTGYRVDVIPVNLPGEHGQRLPISRNTFAEVTGLSPGVTYYFKVFAVSHGRESKPLTAQQTTKLDAPTNLQFVNETDSTVLVRWTPPRAQITGYRLTVGLTRRGQPRQYNVGPSVSKYPLRNLQPASEYTVSLVAIKGNQESPKATGVFTTLQPGSSIPPYNTEVTETTIVITWTPAPRIGFKLGVRPSQGGEAPREVTSDSGSIVVSGLTPGVEYVYTIQVLRDGQERDAPIVNKVVTPLSPPTNLHLEANPDTGVLTVSWERSTTPDITGYRITTTPTNGQQGNSLEEVVHADQSSCTFDNLSPGLEYNVSVYTVKDDKESVPISDTIIPAVPPPTDLRFTNIGPDTMRVTWAPPPSIDLTNFLVRYSPVKNEEDVAELSISPSDNAVVLTNLLPGTEYVVSVSSVYEQHESTPLRGRQKTGLDSPTGIDFSDITANSFTVHWIAPRATITGYRIRHHPEHFSGRPREDRVPHSRNSITLTNLTPGTEYVVSIVALNGREESPLLIGQQSTVSDVPRDLEVVAATPTSLLISWDAPAVTVRYYRITYGETGGNSPVQEFTVPGSKSTATISGLKPGVDYTITVYAVTGRGDSPASSKPISINYRTEIDKPSQMQVTDVQDNSISVKWLPSSSPVTGYRVTTTPKNGPGPTKTKTAGPDQTEMTIEGLQPTVEYVVSVYAQNPSGESQPLVQTAVTNIDRPKGLAFTDVDVDSIKIAWESPQGQVSRYRVTYSSPEDGIHELFPAPDGEEDTAELQGLRPGSEYTVSVVALHDDMESQPLIGTQSTAIPAPTDLKFTQVTPTSLSAQWTPPNVQLTGYRVRVTPKEKTGPMKEINLAPDSSSVVVSGLMVATKYEVSVYALKDTLTSRPAQGVVTTLENVSPPRRARVTDATETTITISWRTKTETITGFQVDAVPANGQTPIQRTIKPDVRSYTITGLQPGTDYKIYLYTLNDNARSSPVVIDASTAIDAPSNLRFLATTPNSLLVSWQPPRARITGYIIKYEKPGSPPREVVPRPRPGVTEATITGLEPGTEYTIYVIALKNNQKSEPLIGRKKTGQEALSQTTISWAPFQDTSEYIISCHPVGTDEEPLQFRVPGTSTSATLTGLTRGATYNIIVEALKDQQRHKVREEVVTVGNSGWCHDNGVNYKIGEKWDRQGENGQMMSCTCLGNGKGEFKCDPHEATCYDDGKTYHVGEQWQKEYLGAICSCTCFGGQRGWRCDNCRRPGGEPSPEGTTGQSYNQYSQRYHQRTNTNVNCPIECFMPLDVQADREDSRE

SEQ ID NO: 363 - protein, 2296 aa, Homo sapiens [sequence omitted]

SEQ ID NO: 364 - protein, 693 aa, Homo sapiens [sequence omitted]

SEQ ID NO: 365 - protein, 1259 aa, Homo sapiens
MWTPPESAVTGYRVDVIPVNLPGEHGQRLPISRNTFAEVTGLSPGVTYYFKVFAVSHGRESKPLTAQQTTKLDAPTNLQFVNETDSTVLVRWTPPRAQITGYRLTVGLTRRGQPRQYNVGPSVSKYPLRNLQPASEYTVSLVAIKGNQESPKATGVFTTLQPGSSIPPYNTEVTETTIVITWTPAPRIGFKLGVRPSQGGEAPREVTSDSGSIVVSGLTPGVEYVYTIQVLRDGQERDAPIVNKVVTPLSPPTNLHLEANPDTGVLTVSWERSTTPDITGYRITTTPTNGQQGNSLEEVVHADQSSCTFDNLSPGLEYNVSVYTVKDDKESVPISDTIIPAVPPPTDLRFTNIGPDTMRVTWAPPPSIDLTNFLVRYSPVKNEEDVAELSISPSDNAVVLTNLLPGTEYVVSVSSVYEQHESTPLRGRQKTGLDSPTGIDFSDITANSFTVHWIAPRATITGYRIRHHPEHFSGRPREDRVPHSRNSITLTNLTPGTEYVVSIVALNGREESPLLIGQQSTVSDVPRDLEVVAATPTSLLISWDAPAVTVRYYRITYGETGGNSPVQEFTVPGSKSTATISGLKPGVDYTITVYAVTGRGDSPASSKPISINYRTEIDKPSQMQVTDVQDNSISVKWLPSSSPVTGYRVTTTPKNGPGPTKTKTAGPDQTEMTIEGLQPTVEYVVSVYAQNPSGESQPLVQTAVTNIDRPKGLAFTDVDVDSIKIAWESPQGQVSRYRVTYSSPEDGIHELFPAPDGEEDTAELQGLRPGSEYTVSVVALHDDMESQPLIGTQSTAIPAPTDLKFTQVTPTSLSAQWTPPNVQLTGYRVRVTPKEKTGPMKEINLAPDSSSVVVSGLMVATKYEVSVYALKDTLTSRPAQGVVTTLENVSPPRRARVTDATETTITISWRTKTETITGFQVDAVPANGQTPIQRTIKPDVRSYTITGLQPGTDYKIYLYTLNDNARSSPVVIDASTAIDAPSNLRFLATTPNSLLVSWQPPRARITGYIIKYEKPGSPPREVVPRPRPGVTEATITGLEPGTEYTIYVIALKNNQKSEPLIGRKKTVNEGLNQPTDDSCFDPYTVSHYAVGDEWERMSESGFKLLCQCLGFGSGHFRCDSSRWCHDNGVNYKIGEKWDRQGENGQMMSCTCLGNGKGEFKCDPHEATCYDDGKTYHVGEQWQKEYLGAICSCTCFGGQRGWRCDNCRRPGGEPSPEGTTGQSYNQYSQRYHQRTNTNVNCPIECFMPLDVQADREDSRE

SEQ ID NO: 366 - protein, 2355 aa, Homo sapiens [sequence omitted]

SEQ ID NO: 367 - protein, 355 aa, Homo sapiens
MDQFPESVTENFEYDDLAEACYIGDIVVFGTVFLSIFYSVIFAIGLVGNLLVVFALTNSKKPKSVTDIYLLNLALSDLLFVATLPFWTHYLINEKGLHNAMCKFTTAFFFIGFFGSIFFITVISIDRYLAIVLAANSMNNRTVQHGVTISLGVWAAAILVAAPQFMFTKQKENECLGDYPEVLQEIWPVLRNVETNFLGFLLPLLIMSYCYFRIIQTLFSCKNHKKAKAIKLILLVVIVFFLFWTPYNVMIFLETLKLYDFFPSCDMRKDLRLALSVTETVAFSHCCLNPLIYAFAGEKFRRYLYHLYGKCLAVLCGRSVHVDFSSSESQRSRHGSVLSSNFTYHTSDGDALLLL

SEQ ID NO: 368 - protein, 362 aa, Homo sapiens
MASGAFTMDQFPESVTENFEYDDLAEACYIGDIVVFGTVFLSIFYSVIFAIGLVGNLLVVFALTNSKKPKSVTDIYLLNLALSDLLFVATLPFWTHYLINEKGLHNAMCKFTTAFFFIGFFGSIFFITVISIDRYLAIVLAANSMNNRTVQHGVTISLGVWAAAILVAAPQFMFTKQKENECLGDYPEVLQEIWPVLRNVETNFLGFLLPLLIMSYCYFRIIQTLFSCKNHKKAKAIKLILLVVIVFFLFWTPYNVMIFLETLKLYDFFPSCDMRKDLRLALSVTETVAFSHCCLNPLIYAFAGEKFRRYLYHLYGKCLAVLCGRSVHVDFSSSESQRSRHGSVLSSNFTYHTSDGDALLLL

SEQ ID NO: 369 - protein, 1545 aa, Homo sapiens
MLEKFCNSTFWNSSFLDSPEADLPLCFEQTVLVWIPLGFLWLLAPWQLLHVYKSRTKRSSTTKLYLAKQVFVGFLLILAAIELALVLTEDSGQATVPAVRYTNPSLYLGTWLLVLLIQYSRQWCVQKNSWFLSLFWILSILCGTFQFQTLIRTLLQGDNSNLAYSCLFFISYGFQILILIFSAFSENNESSNNPSSIASFLSSITYSWYDSIILKGYKRPLTLEDVWEVDEEMKTKTLVSKFETHMKRELQKARRALQRRQEKSSQQNSGARLPGLNKNQSQSQDALVLEDVEKKKKKSGTKKDVPKSWLMKALFKTFYMVLLKSFLLKLVNDIFTFVSPQLLKLLISFASDRDTYLWIGYLCAILLFTAALIQSFCLQCYFQLCFKLGVKVRTAIMASVYKKALTLSNLARKEYTVGETVNLMSVDAQKLMDVTNFMHMLWSSVLQIVLSIFFLWRELGPSVLAGVGVMVLVIPINAILSTKSKTIQVKNMKNKDKRLKIMNEILSGIKILKYFAWEPSFRDQVQNLRKKELKNLLAFSQLQCVVIFVFQLTPVLVSVVTFSVYVLVDSNNILDAQKAFTSITLFNILRFPLSMLPMMISSMLQASVSTERLEKYLGGDDLDTSAIRHDCNFDKAMQFSEASFTWEHDSEATVRDVNLDIMAGQLVAVIGPVGSGKSSLISAMLGEMENVHGHITIKGTTAYVPQQSWIQNGTIKDNILFGTEFNEKRYQQVLEACALLPDLEMLPGGDLAEIGEKGINLSGGQKQRISLARATYQNLDIYLLDDPLSAVDAHVGKHIFNKVLGPNGLLKGKTRLLVTHSMHFLPQVDEIVVLGNGTIVEKGSYSALLAKKGEFAKNLKTFLRHTGPEEEATVHDGSEEEDDDYGLISSVEEIPEDAASITMRRENSFRRTLSRSSRSNGRHLKSLRNSLKTRNVNSLKEDEELVKGQKLIKKEFIETGKVKFSIYLEYLQAIGLFSIFFIILAFVMNSVAFIGSNLWLSAWTSDSKIFNSTDYPASQRDMRVGVYGALGLAQGIFVFIAHFWSAFGFVHASNILHKQLLNNILRAPMRFFDTTPTGRIVNRFAGDISTVDDTLPQSLRSWITCFLGIISTLVMICMATPVFTIIVIPLGIIYVSVQMFYVSTSRQLRRLDSVTRSPIYSHFSETVSGLPVIRAFEHQQRFLKHNEVRIDTNQKCVFSWITSNRWLAIRLELVGNLTVFFSALMMVIYRDTLSGDTVGFVLSNALNITQTLNWLVRMTSEIETNIVAVERITEYTKVENEAPWVTDKRPPPDWPSKGKIQFNNYQVRYRPELDLVLRGITCDIGSMEKIGVVGRTGAGKSSLTNCLFRILEAAGGQIIIDGVDIASIGLHDLREKLTIIPQDPILFSGSLRMNLDPFNNYSDEEIWKALELAHLKSFVASLQLGLSHEVTEAGGNLSIGQRQLLCLGRALLRKSKILVLDEATAAVDLETDNLIQTTIQNEFAHCTVITIAHRLHTIMDSDKVMVLDNGKIIECGSPEELLQIPGPFYFMAKEAGIENVNSTKF

SEQ ID NO: 370 - protein, 1545 aa, Homo sapiens; identical to SEQ ID NO: 369

SEQ ID NO: 371 - protein, 451 aa, Homo sapiens
MDFDVGRTTHLSSSPCSASNGGESGQVSKRRCLIGESGHDTPWCSPIKVKYGDVYCRAPQGGYYKTALGTRCDIRCQKGYELHGSSLLICQSNKRWSDKVICKQKRCPTLAMPANGGFKCVDGAYFNSRCEYYCSPGYTLKGERTVTCMDNKAWSGRPASCVDMEPPRIKCPSVKERIAEPNKLTVRVSWETPEGRDTADGILTDVILKGLPPGSNFPEGDHKIQYTVYDRAENKGTCKFRVKVRVKRCGKLNAPENGYMKCSSDGDNYGATCEFSCIGGYELQGSPARVCQSNLAWSGTEPTCAAMNVNVGVRTAAALLDQFYEKRRLLIVSTPTARNLLYRLQLGMLQQAQCGLDLRHITVVELVGVFPTLIGRIGAKIMPPALALQLRLLLRIPLYSFSMVLVDKHGMDKERYVSLVMPVALFNLIDTFPLRKEEMVLQAEMSQTCNT

SEQ ID NO: 372 - protein, 464 aa, Homo sapiens
MGSPAHRPALLLLLPPLLLLLLLRVPPSRSFPGSGDSPLEDDEVGYSHPRYKDTPWCSPIKVKYGDVYCRAPQGGYYKTALGTRCDIRCQKGYELHGSSLLICQSNKRWSDKVICKQKRCPTLAMPANGGFKCVDGAYFNSRCEYYCSPGYTLKGERTVTCMDNKAWSGRPASCVDMEPPRIKCPSVKERIAEPNKLTVRVSWETPEGRDTADGILTDVILKGLPPGSNFPEGDHKIQYTVYDRAENKGTCKFRVKVRVKRCGKLNAPENGYMKCSSDGDNYGATCEFSCIGGYELQGSPARVCQSNLAWSGTEPTCAAMNVNVGVRTAAALLDQFYEKRRLLIVSTPTARNLLYRLQLGMLQQAQCGLDLRHITVVELVGVFPTLIGRIGAKIMPPALALQLRLLLRIPLYSFSMVLVDKHGMDKERYVSLVMPVALFNLIDTFPLRKEEMVLQAEMSQTCNT

SEQ ID NO: 373 - protein, 441 aa, Homo sapiens
MVPPKLHVLFCLCGCLAVVYPFDWQYINPVAHMKSSAWVNKIQVLMAAASFGQTKIPRGNGPYSVGCTDLMFDHTNKGTFLRLYYPSQDNDRLDTLWIPNKEYFWGLSKFLGTHWLMGNILRLLFGSMTTPANWNSPLRPGEKYPLVVFSHGLGAFRTLYSAIGIDLASHGFIVAAVEHRDRSASATYYFKDQSAAEIGDKSWLYLRTLKQEEETHIRNEQVRQRAKECSQALSLILDIDHGKPVKNALDLKFDMEQLKDSIDREKIAVIGHSFGGATVIQTLSEDQRFRCGIALDAWMFPLGDEVYSRIPQPLFFINSEYFQYPANIIKMKKCYSPDKERKMITIRGSVHQNFADFTFATGKIIGHMLKLKGDIDSNAAIDLSNKASLAFLQKHLGLHKDFDQWDCLIEGDDENLIPGTNINTTNQHIMLQNSSGIEKYN

SEQ ID NO: 374 - protein, 441 aa, Homo sapiens; identical to SEQ ID NO: 373

SEQ ID NO: 375 - protein, 745 aa, Homo sapiens
MERPPGLRPGAGGPWEMRERLGTGGFGNVCLYQHRELDLKIAIKSCRLELSTKNRERWCHEIQIMKKLNHANVVKACDVPEELNILIHDVPLLAMEYCSGGDLRKLLNKPENCCGLKESQILSLLSDIGSGIRYLHENKIIHRDLKPENIVLQDVGGKIIHKIIDLGYAKDVDQGSLCTSFVGTLQYLAPELFENKPYTATVDYWSFGTMVFECIAGYRPFLHHLQPFTWHEKIKKKDPKCIFACEEMSGEVRFSSHLPQPNSLCSLVVEPMENWLQLMLNWDPQQRGGPVDLTLKQPRCFVLMDHILNLKIVHILNMTSAKIISFLLPPDESLHSLQSRIERETGINTGSQELLSETGISLDPRKPASQCVLDGVRGCDSYMVYLFDKSKTVYEGPFASRSLSDCVNYIVQDSKIQLPIIQLRKVWAEAVHYVSGLKEDYSRLFQGQRAAMLSLLRYNANLTKMKNTLISASQQLKAKLEFFHKSIQLDLERYSEQMTYGISSEKMLKAWKEMEEKAIHYAEVGVIGYLEDQIMSLHAEIMELQKSPYGRRQGDLMESLEQRAIDLYKQLKHRPSDHSYSDSTEMVKIIVHTVQSQDRVLKELFGHLSKLLGCKQKIIDLLPKVEVALSNIKEADNTVMFMQGKRQKEIWHLLKIACTQSSARSLVGSSLEGAVTPQTSAWLPPTSAEHDHSLSCVVTPQDGETSAQMIEENLNCLGHLSTIIHEANEEQGNSMMNLDWSWLTE

SEQ ID NO: 376 - protein, 4347 aa, Homo sapiens [sequence omitted]

SEQ ID NO: 377 - protein, 4346 aa, Homo sapiens [sequence omitted]

SEQ ID NO: 378 - protein, 3588 aa, Homo sapiens
MKATATSCRPCPCPYIDASRRFSDTCFLDTDGQATCDACAPGYTGRRCESCAPGYEGNPIQPGGKCRPVNQEIVRCDERGSMGTSGEACRCKNNVVGRLCNECADGSFHLSTRNPDGCLKCFCMGVSRHCTSSSWSRAQLHGASEEPGHFSLTNAASTHTTNEGIFSPTPGELGFSSFHRLLSGPYFWSLPSRFLGDKVTSYGGELRFTVTQRSQPGSTPLHGQPLVVLQGNNIILEHHVAQEPSPGQPSTFIVPFREQAWQRPDGQPATREHLLMALAGIDTLLIRASYAQQPAESRVSGISMDVAVPEETGQDPALEVEQCSCPPGYRGPSCQDCDTGYTRTPSGLYLGTCERCSCHGHSEACEPETGACQGCQHHTEGPRCEQCQPGYYGDAQRGTPQDCQLCPCYGDPAAGQAAHTCFLDTDGHPTCDACSPGHSGRHCERCAPGYYGNPSQGQPCQRDSQVPGPIGCNCDPQGSVSSQCDAAGQCQCKAQVEGLTCSHCRPHHFHLSASNPDGCLPCFCMGITQQCASSAYTRHLISTHFAPGDFQGFALVNPQRNSRLTGEFTVEPVPEGAQLSFGNFAQLGHESFYWQLPETYQGDKVAAYGGKLRYTLSYTAGPQGSPLSDPDVQITGNNIMLVASQPALQGPERRSYEIMFREEFWRRPDGQPATREHLLMALADLDELLIRATFSSVPLAASISAVSLEVAQPGPSNRPRALEVEECRCPPGYIGLSCQDCAPGYTRTGSGLYLGHCELCECNGHSDLCHPETGACSQCQHNAAGEFCELCAPGYYGDATAGTPEDCQPCACPLTNPENMFSRTCESLGAGGYRCTACEPGYTGQYCEQCGPGYVGNPSVQGGQCLPETNQAPLVVEVHPARSIVPQGGSHSLRCQVSGSPPHYFYWSREDGRPVPSGTQQRHQGSELHFPSVQPSDAGVYICTCRNLHQSNTSRAELLVTEAPSKPITVTVEEQRSQSVRPGADVTFICTAKSKSPAYTLVWTRLHNGKLPTRAMDFNGILTIRNVQLSDAGTYVCTGSNMFAMDQGTATLHVQASGTLSAPVVSIHPPQLTVQPGQLAEFRCSATGSPTPTLEWTGGPGGQLPAKAQIHGGILRLPAVEPTDQAQYLCRAHSSAGQQVARAVLHVHGGGGPRVQVSPERTQVHAGRTVRLYCRAAGVPSATITWRKEGGSLPPQARSERTDIATLLIPAITTADAGFYLCVATSPAGTAQARIQVVVLSASDASPPPVKIESSSPSVTEGQTLDLNCVVAGSAHAQVTWYRRGGSLPPHTQVHGSRLRLPQVSPADSGEYVCRVENGSGPKEASITVSVLHGTHSGPSYTPVPGSTRPIRIEPSSSHVAEGQTLDLNCVVPGQAHAQVTWHKRGGSLPARHQTHGSLLRLHQVTPADSGEYVCHVVGTSGPLEASVLVTIEASVIPGPIPPVRIESSSSTVAEGQTLDLSCVVAGQAHAQVTWYKRGGSLPARHQVRGSRLYIFQASPADAGQYVCRASNGMEASITVTVTGTQGANLAYPAGSTQPIRIEPSSSQVAEGQTLDLNCVVPGQSHAQVTWHKRGGSLPVRHQTHGSLLRLYQASPADSGEYVCRVLGSSVPLEASVLVTIEPAGSVPALGVTPTVRIESSSSQVAEGQTLDLNCLVAGQAHAQVTWHKRGGSLPARHQVHGSRLRLLQVTPADSGEYVCRVVGSSGTQEASVLVTIQQRLSGSHSQGVAYPVRIESSSASLANGHTLDLNCLVASQAPHTITWYKRGGSLPSRHQIVGSRLRIPQVTPADSGEYVCHVSNGAGSRETSLIVTIQGSGSSHVPSVSPPIRIESSSPTVVEGQTLDLNCVVARQPQAIITWYKRGGSLPSRHQTHGSHLRLHQMSVADSGEYVCRANNNIDALEASIVISVSPSAGSPSAPGSSMPIRIESSSSHVAEGETLDLNCVVPGQAHAQVTWHKRGGSLPSHHQTRGSRLRLHHVSPADSGEYVCRVMGSSGPLEASVLVTIEASGSSAVHVPAPGGAPPIRIEPSSSRVAEGQTLDLKCVVPGQAHAQVTWHKRGGNLPARHQVHGPLLRLNQVSPADSGEYSCQVTGSSGTLEASVLVTIEPSSPGPIPAPGLAQPIYIEASSSHVTEGQTLDLNCVVPGQAHAQVTWYKRGGSLPARHQTHGSQLRLHLVSPADSGEYVCRAASGPGPEQEASFTVTVPPSEGSSYRLRSPVISIDPPSSTVQQGQDASFKCLIHDGAAPISLEWKTRNQELEDNVHISPNGSIITIVGTRPSNHGTYRCVASNAYGVAQSVVNLSVHGPPTVSVLPEGPVWVKVGKAVTLECVSAGEPRSSARWTRISSTPAKLEQRTYGLMDSHAVLQISSAKPSDAGTYVCLAQNALGTAQKQVEVIVDTGAMAPGAPQVQAEEAELTVEAGHTATLRCSATGSPAPTIHWSKLRSPLPWQHRLEGDTLIIPRVAQQDSGQYICNATSPAGHAEATIILHVESPPYATTVPEHASVQAGETVQLQCLAHGTPPLTFQWSRVGSSLPGRATARNELLHFERAAPEDSGRYRCRVTNKVGSAEAFAQLLVQGPPGSLPATSIPAGSTPTVQVTPQLETKSIGASVEFHCAVPSDRGTQLRWFKEGGQLPPGHSVQDGVLRIQNLDQSCQGTYICQAHGPWGKAQASAQLVIQALPSVLINIRTSVQTVVVGHAVEFECLALGDPKPQVTWSKVGGHLRPGIVQSGGVVRIAHVELADAGQYRCTATNAAGTTQSHVLLLVQALPQISMPQEVRVPAGSAAVFPCIASGYPTPDISWSKLDGSLPPDSRLENNMLMLPSVRPQDAGTYVCTATNRQGKVKAFAHLQVPERVVPYFTQTPYSFLPLPTIKDAYRKFEIKITFRPDSADGMLLYNGQKRVPGSPTNLANRQPDFISFGLVGGRPEFRFDAGSGMATIRHPTPLALGHFHTVTLLRSLTQGSLIVGDLAPVNGTSQGKFQGLDLNEELYLGGYPDYGAIPKAGLSSGFIGCVRELRIQGEEIVFHDLNLTAHGISHCPTCRDRPCQNGGQCHDSESSSYVCVCPAGFTGSRCEHSQALHCHPEACGPDATCVNRPDGRGYTCRCHLGRSGLRCEEGVTVTTPSLSGAGSYLALPALTNTHHELRLDVEFKPLAPDGVLLFSGGKSGPVEDFVSLAMVGGHLEFRYELGSGLAVLRSAEPLALGRWHRVSAERLNKDGSLRVNGGRPVLRSSPGKSQGLNLHTLLYLGGVEPSVPLSPATNMSAHFRGCVGEVSVNGKRLDLTYSFLGSQGIGQCYDSSPCERQPCQHGATCMPAGEYEFQCLCRDGFKGDLCEHEENPCQLREPCLHGGTCQGTRCLCLPGFSGPRCQQGSGHGIAESDWHLEGSGGNDAPGQYGAYFHDDGFLAFPGHVFSRSLPEVPETIELEVRTSTASGLLLWQGVEVGEAGQGKDFISLGLQDGHLVFRYQLGSGEARLVSEDPINDGEWHRVTALREGRRGSIQVDGEELVSGRSPGPNVAVNAKGSVYIGGAPDVATLTGGRFSSGITGCVKNLVLHSARPGAPPPQPLDLQHRAQAGANTRPCPS

SEQ ID NO: 379 - protein, 343 aa, Homo sapiens
MKTPRMVVMAPRTLFLLLSGALTLTETWAGSHSMRYFSAAVSRPGRGEPRFIAMGYVDDTQFVRFDSDSACPRMEPRAPWVEQEGPEYWEEETRNTKAHAQTDRMNLQTLRGYYNQSEASSHTLQWMIGCDLGSDGRLLRGYEQYAYDGKDYLALNEDLRSWTAADTAAQISKRKCEAANVAEQRRAYLEGTCVEWLHRYLENGKEMLQRADPPKTHVTHHPVFDYEATLRCWALGFYPAEIILTWQRDGEDQTQDVELVETRPAGDGTFQKWAAVVVPSGEEQRYTCHVQHEGLPEPLMLRWKQSSLPTIPIMGIVAGLVVLAAVVTGAAVAAVLWRKKSSD

SEQ ID NO: 380 - protein, 338 aa, Homo sapiens
MVVMAPRTLFLLLSGALTLTETWAGSHSMRYFSAAVSRPGRGEPRFIAMGYVDDTQFVRFDSDSACPRMEPRAPWVEQEGPEYWEEETRNTKAHAQTDRMNLQTLRGYYNQSEASSHTLQWMIGCDLGSDGRLLRGYEQYAYDGKDYLALNEDLRSWTAADTAAQISKRKCEAANVAEQRRAYLEGTCVEWLHRYLENGKEMLQRADPPKTHVTHHPVFDYEATLRCWALGFYPAEIILTWQRDGEDQTQDVELVETRPAGDGTFQKWAAVVVPSGEEQRYTCHVQHEGLPEPLMLRWKQSSLPTIPIMGIVAGLVVLAAVVTGAAVAAVLWRKKSSD

SEQ ID NO: 381 - protein, 105 aa, Homo sapiens
MGYVDDTQFVRFDSDSACPRMEPRAPWVEQEGPEYWEEETRNTKAHAQTDRMNLQTLRGYYNQSEAKQSSLPTIPIMGIVAGLVVLAAVVTGAAVAAVLWRKKSS

SEQ ID NO: 382 - protein, 158 aa, Homo sapiens
MKTPRMVVMAPRTLFLLLSGALTLTETWAGSHSMRYFSAAVSRPGRGEPRFIAMGYVDDTQFVRFDSDSACPRMEPRAPWVEQEGPEYWEEETRNTKAHAQTDRMNLQTLRGYYNQSEAKQSSLPTIPIMGIVAGLVVLAAVVTGAAVAAVLWRKKSS

SEQ ID NO: 383 - protein, 169 aa, Homo sapiens
MGYVDDTQFVRFDSDSACPRMEPRAPWVEQEGPEYWEEETRNTKAHAQTDRMNLQTLRGYYNQSEAKIILTWQRDGEDQTQDVELVETRPAGDGTFQKWAAVVVPSGEEQRYTCHVQHEGLPEPLMLRWKQSSLPTIPIMGIVAGLVVLAAVVTGAAVAAVLWRKKSSD

SEQ ID NO: 384 - protein, 251 aa, Homo sapiens
MKTPRMVVMAPRTLFLLLSGALTLTETWAGSHSMRYFSAAVSRPGRGEPRFIAMGYVDDTQFVRFDSDSACPRMEPRAPWVEQEGPEYWEEETRNTKAHAQTDRMNLQTLRGYYNQSEANPPKTHVTHHPVFDYEATLRCWALGFYPAEIILTWQRDGEDQTQDVELVETRPAGDGTFQKWAAVVVPSGEEQRYTCHVQHEGLPEPLMLRWKQSSLPTIPIMGIVAGLVVLAAVVTGAAVAAVLWRKKSSD

SEQ ID NO: 385 - protein, 206 aa, Homo sapiens
MSWTHTETQGYGMKGKLTLWQQAPWSDFSSRRVHGDRVSLLPLPTCVGSFFLDTHQAAPVLTPIECRVPREANQCSRGPGSKVPTHPPGLRFSPVAEDGVMAPRTLLLLLSGALVLTQTWAGFHSLRYFHTTMSRPGRADPRFLSVGDVDDTQCVRLDSDATSPRMEPEGPEYWEEETGTAKAKAQFYRVNLRTLSGYYNQSEACE

SEQ ID NO: 386 - protein, 243 aa, Homo sapiens
MAPRTLLLLLSGALVLTQTWAGSHSMRYFSAAVSRPGRGEPRFIAMGYVDDTQFVRFDSDSACPRMEPRAPWVEQEGPEYWEEETRNTKAHAQTDRMNLQTLRGYYNQSEASSHTLQWMIGCDLGSDGRLLRGYEQYAYDGKDYLALNEDLRSWTAADTAAQISKRKCEAANVAEQRRAYLEGTCVEWLHRYLENGKEMLQRAGPSSQPTFLIMGIVTVLVVLGAVVTAVMWKNKTPGRKGVS

SEQ ID NO: 387 - protein, 198 aa, Homo sapiens
MGYVDDTQFVRFDSDSACPRMEPRAPWVEQEGPEYWEEETRNTKAHAQTDRMNLQTLRGYYNQSEANPPKTHVTHHPVFDYEATLRCWALGFYPAEIILTWQRDGEDQTQDVELVETRPAGDGTFQKWAAVVVPSGEEQRYTCHVQHEGLPEPLMLRWKQSSLPTIPIMGIVAGLVVLAAVVTGAAVAAVLWRKKSSD

SEQ ID NO: 388 - protein, 338 aa, Homo sapiens; identical to SEQ ID NO: 380

SEQ ID NO: 389 - protein, 126 aa, Homo sapiens
MNLAPLECQATAGSRCSWPSGGSTCSAGASRHCFTGCGVPSRPGAWQWHGSTGWMPKGQSSWCGPCQPSRSLCHSRAPWSFPCLPAPGPLRFQGRGERGSIRPPQPGKRGRPRAPPSTRVQTAFNP

SEQ ID NO: 390 - protein, 335 aa, Homo sapiens
MGKVKVGVNGFGRIGRLVTRAAFNSGKVDIVAINDPFIDLNYMVYMFQYDSTHGKFHGTVKAENGKLVINGNPITIFQERDPSKIKWGDAGAEYVVESTGVFTTMEKAGAHLQGGAKRVIISAPSADAPMFVMGVNHEKYDNSLKIISNASCTTNCLAPLAKVIHDNFGIVEGLMTTVHAITATQKTVDGPSGKLWRDGRGALQNIIPASTGAAKAVGKVIPELNGKLTGMAFRVPTANVSVVDLTCRLEKPAKYDDIKKVVKQASEGPLKGILGYTEHQVVSSDFNSDTHSSTFDAGAGIALNDHFVKLISWYDNEFGYSNRVVDLMAHMASKE

SEQ ID NO: 391 - protein, 67 aa, Homo sapiens
MGPLTSFRRAPSSSPAKASSAISLAPSSVGSFLVRSPVPVAPVTSSENSAGDRHESGMLGLPETTGT

SEQ ID NO: 392 - protein, 102 aa, Homo sapiens
MRPGPVPAPGRALPRTAAVVAGPPEGSGCGPGSGGWDRPGKEEAGKEGCPVGLGAPGNPEASSGTARLYRADLPPGLSQLRRVVGSGRRIFLLAALFEWNGG

SEQ ID NO: 393 - protein, 627 aa, Homo sapiens
MARGSVSDEEMMELREAFAKVDTDGNGYISFNELNDLFKAACLPLPGYRVREITENLMATGDLDQDGRISFDEFIKIFHGLKSTDVAKTFRKAINKKEGICAIGGTSEQSSVGTQHSYSEEEKYAFVNWINKALENDPDCRHVIPMNPNTNDLFNAVGDGIVLCKMINLSVPDTIDERTINKKKLTPFTIQENLNLALNSASAIGCHVVNIGAEDLKEGKPYLVLGLLWQVIKIGLFADIELSRNEALIALLREGESLEDLMKLSPEELLLRWANYHLENAGCNKIGNFSTDIKDSKAYYHLLEQVAPKGDEEGVPAVVIDMSGLREKDDIQRAECMLQQAERLGCRQFVTATDVVRGNPKLNLAFIANLFNRYPALHKPENQDIDWGALEGETREERTFRNWMNSLGVNPRVNHLYSDLSDALVIFQLYEKIKVPVDWNRVNKPPYPKLGGNMKKLENCNYAVELGKNQAKFSLVGIGGQDLNEGNRTLTLALIWQLMRRYTLNILEEIGGGQKVNDDIIVNWVNETLREAKKSSSISSFKDPKISTSLPVLDLIDAIQPGSINYDLLKTENLNDDEKLNNAKYAISMARKIGARVYALPEDLVEVNPKMVMTVFACLMGKGMKRV

SEQ ID NO: 394 - protein, 627 aa, Homo sapiens; identical to SEQ ID NO: 393

SEQ ID NO: 395 - protein, 627 aa, Homo sapiens; identical to SEQ ID NO: 393

SEQ ID NO: 396 - protein, 402 aa, Homo sapiens
MGKLVALVLLGVGLSLVGEMFLAFRERVNASREVEPVEPENCHLIEELESGSEDIDILPSGLAFISSLQVCWSLLEVHSRPCLPGYHQWRLQNGKYCCLIFLLEASSQRGIRLYEGLKYPGMPNFAPDEPGKIFLMDLNEQNPRAQALEISGGFDKELFNPHGISIFIDKDNTVYLYVVNHPHMKSTVEIFKFEEQQRSLVYLKTIKHELLKSVNDIVVLGPEQFYATRDHYFTNSLLSFFEMILDLRWTYVLFYSPREVKVVAKGFCSANGITVSADQKYVYVADVAAKNIHIMEKHDNWDLTQLKVIQLGTLVDNLTVDPATGDILAGCHPNPMKLLNYNPEDPPGSEVLRIQNVLSEKPRVSTVYANNGSVLQGTSVASVYHGKILIGTVFHKTLYCEL

SEQ ID NO: 397 - protein, 355 aa, Homo sapiens [sequence omitted]

SEQ ID NO: 398 - protein, 268 aa, Homo sapiens
MDLNEEDPTVLELGITGSKFDVSSFNPHGISTFTDEDNAMYLLVVNHPDAKSTVELFKFQEEEKSLLHLKTIRHKLLPNLNDIVAVGPEHFYGTNDHYFLDPYLQSWEMYLGLAWSYVVYYSPSEVRVVAEGFDFANGINISPDGKYVYIAELLAHKIHVYEKHANWTLTPLKSLDFNTLVDNISVDPETGDLWVGCHPNGMKIFFYDSENPPASEVLRIQNILTEEPKVTQVYAENGTVLQGSTVASVYKGKLLIGTVFHKALYCEL

SEQ ID NO: 399 - protein, 354 aa, Homo sapiens
MGKLVALVLLGVGLSLVGEMFLAFRERVNASREVEPVEPENCHLIEELESGSEDIDILPSGLAFISSGLKYPGMPNFAPDEPGKIFLMDLNEQNPRAQALEISGGFDKELFNPHGISIFIDKDNTVYLYVVNHPHMKSTVEIFKFEEQQRSLVYLKTIKHELLKSVNDIVVLGPEQFYATRDHYFTNSLLSFFEMILDLRWTYVLFYSPREVKVVAKGFCSANGITVSADQKYVYVADVAAKNIHIMEKHDNWDLTQLKVIQLGTLVDNLTVDPATGDILAGCHPNPMKLLNYNPEDPPGSEVLRIQNVLSEKPRVSTVYANNGSVLQGTSVASVYHGKILIGTVFHKTLYCEL

SEQ ID NO: 400 - protein, 355 aa, Homo sapiens [sequence omitted]

SEQ ID NO: 401 - protein, 346 aa, Homo sapiens
MPRGCDPNNPGGVSGRGLAQPEEAPAAQGQGCAEAASAPPAPPADPEITRGSGWRPTGCSQPRVMFMTAEPQARSYPREGSWHGRRLKDWRVWSVEAGGQRLQLWKRGHAASSWCSIREPFGQCLSVCLPLCLRAPSIWDGRNLWRPHPPPCTLWMTWYPGWTTYWPLSSTSLIWAPDGSLRFPALRVDSVPSSVQNPPVLPFGPLCSCLVFPRNSHPHSISHCGLTNLLSSLRTGLAGSLGMSFIFLSVKLARCPLPFTLENKISLCNMVKPHLYQQNKKTQKLARCGGASLYSQQLGGLRWENGLSLGGRGCSELRSHHCTLARVTKPDLVSKNTGMNMSITLI

SEQ ID NO: 402 - protein, 321 aa, Homo sapiens [sequence omitted]

SEQ ID NO: 403 - protein, 620 aa, Homo sapiens [sequence omitted]

SEQ ID NO: 404 - protein, 331 aa, Homo sapiens
MSRYLLPLSALGTVAGAAVLLKDYVTGGACPSKATIPGKTVIVTGANTGIGKQTALELARRGGNIILACRDMEKCEAAAKDIRGETLNHHVNARHLDLASLKSIREFAAKIIEEEERVDILINNAGVMRCPHWTTEDGFEMQFGVNHLGHFLLTNLLLDKLKASAPSRIINLSSLAHVAGHIDFDDLNWQTRKYNTKAAYCQSKLAIVLFTKELSRRLQGSGVTVNALHPGVARTELGRHTGIHGSTFSSTTLGPIFWLLVKSPELAAQPSTYLAVAEELADVSGKYFDGLKQKAPAPEAEDEEVARRLWAESARLVGLEAPSVREQPLPR

SEQ ID NO: 405 - protein, 260 aa, Homo sapiens
MEKCEAAAKDIRGETLNHHVNARHLDLASLKSIREFAAKIIEEEERVDILINNAGVMRCPHWTTEDGFEMQFGVNHLGHFLLTNLLLDKLKASAPSRIINLSSLAHVAGHIDFDDLNWQTRKYNTKAAYCQSKLAIVLFTKELSRRLQGSGVTVNALHPGVARTELGRHTGIHGSTFSSTTLGPIFWLLVKSPELAAQPSTYLAVAEELADVSGKYFDGLKQKAPAPEAEDEEVARRLWAESARLVGLEAPSVREQPLPR

SEQ ID NO: 406 - protein, 331 aa, Homo sapiens; identical to SEQ ID NO: 404

SEQ ID NO: 407 - protein, 260 aa, Homo sapiens; identical to SEQ ID NO: 405

SEQ ID NO: 408 - protein, 331 aa, Homo sapiens; identical to SEQ ID NO: 404

SEQ ID NO: 409 - protein, 810 aa, Homo sapiens
MEHKEVVLLLLLFLKSGQGEPLDDYVNTQGASLFSVTKKQLGAGSIEECAAKCEEDEEFTCRAFQYHSKEQQCVIMAENRKSSIIIRMRDVVLFEKKVYLSECKTGNGKNYRGTMSKTKNGITCQKWSSTSPHRPRFSPATHPSEGLEENYCRNPDNDPQGPWCYTTDPEKRYDYCDILECEEECMHCSGENYDGKISKTMSGLECQAWDSQSPHAHGYIPSKFPNKNLKKNYCRNPDRELRPWCFTTDPNKRWELCDIPRCTTPPPSSGPTYQCLKGTGENYRGNVAVTVSGHTCQHWSAQTPHTHNRTPENFPCKNLDENYCRNPDGKRAPWCHTTNSQVRWEYCKIPSCDSSPVSTEQLAPTAPPELTPVVQDCYHGDGQSYRGTSSTTTTGKKCQSWSSMTPHRHQKTPENYPNAGLTMNYCRNPDADKGPWCFTTDPSVRWEYCNLKKCSGTEASVVAPPPVVLLPDVETPSEEDCMFGNGKGYRGKRATTVTGTPCQDWAAQEPHRHSIFTPETNPRAGLEKNYCRNPDGDVGGPWCYTTNPRKLYDYCDVPQCAAPSFDCGKPQVEPKKCPGRVVGGCVAHPHSWPWQVSLRTRFGMHFCGGTLISPEWVLTAAHCLEKSPRPSSYKVILGAHQEVNLEPHVQEIEVSRLFLEPTRKDIALLKLSSPAVITDKVIPACLPSPNYVVADRTECFITGWGETQGTFGAGLLKEAQLPVIENKVCNRYEFLNGRVQSTELCAGHLAGGTDSCQGDSGGPLVCFEKDKYILQGVTSWGLGCARPNKPGVYVRVSRFVTWIEGVMRNN

SEQ ID NO: 410 - protein, 136 aa, Homo sapiens
MEHKEVVLLLLLFLKSGQGEPLDDYVNTQGASLFSVTKKQLGAGSIEECAAKCEEDEEFTCRAFQYHSKEQQCVIMAENRKSSIIIRMRDVVLFEKKVYLSECKTGNGKNYRGTMSKTKNGITCQKWSSTSPHRPR

SEQ ID NO: 411 - protein, 61 aa, Homo sapiens
MAENRKSSIIIRMRDVVLFEKKVYLSECKTGNGKNYRGTMSKTKNGITCQKWSSTSPHRPR

SEQ ID NO: 412 - protein, 149 aa, Homo sapiens [sequence omitted]

SEQ ID NO: 413 - protein, 567 aa, Homo sapiens
MEHKEVVLLLLLFLKSGQGEPLDDYVNTQGASLFSVTKKQLGAGSIEECAAKCEEDEEFTCRAFQYHSKEQQCVIMAENRKSSIIIRMRDVVLFEKKVYLSECKTGNGKNYRGTMSKTKNGITCQKWSSTSPHRPRFSPATHPSEGLEENYCRNPDNDPQGPWCYTTDPEKRYDYCDILECEEECMHCSGENYDGKISKTMSGLECQAWDSQSPHAHGYIPSKFPNKNLKKNYCRNPDRELRPWCFTTDPNKRWELCDIPRCTTPPPSSGPTYQCLKGTGENYRGNVAVTVSGHTCQHWSAQTPHTHNRTPENFPCKNLDENYCRNPDGKRAPWCHTTNSQVRWEYCKIPSCDSSPVSTEQLAPTAPPELTPVVQDCYHGDGQSYRGTSSTTTTGKKCQSWSSMTPHRHQKTPENYPNAGLTMNYCRNPDADKGPWCFTTDPSVRWEYCNLKKCSGTEASVVAPPPVVLLPDVETPSEEDCMFGNGKGYRGKRATTVTGTPCQDWAAQEPHRHSIFTPETNPRAGLEKNYCRNPDGDVGGPWCYTTNPRKLYDYCDVPQCGRLPSFW

SEQ ID NO: 414 - protein, 324 aa, Homo sapiens
MEGPLSVFGDRSTGETIRSQNGMPKRIVNAKIACLDFSLQKTKMKLGVQVVITDPEKLDQIRQRESDITKERIQKILATGANVILTTGGIDDMCLKYFVEAGAMAVRRVLKRDLKRIAKASGATILSTLANLEGEETFEAAMLGQAEEVVQERICDDELILIKNCVVKRVLESKSVVPGGGAVEAALSIYLENYATSMGSREQLAIAEFARSLLVIPNTLAVNAAQDSTDLVAKLRAFHNEAQVNPERKNLKWIGLDLSNGKPRDNKQAGVFEPTIVKVKSLKFATEAAITILRIDDLIKLHPESKDDKHGSYEDAVHSGALND

SEQ ID NO: 415 - protein, 556 aa, Homo sapiens
MEGPLSVFGDRSTGETIRSQNVMAAASIANIVKSSLGPVGLDKMLVDDIGDVTITNDGATILKLLEVEHPAAKVLCELADLQDKEVGDGTTSVVIIAAELLKNADELVKQKIHPTSVISGYRLACKEAVRYINENLIVNTDELGRDCLINAAKTSMSSKIIGINGDFFANMVVDAVLAIKYTDIRGQPRYPVNSVNILKAHGRSQMESMLISGYALNCVVGSQGMPKRIVNAKIACLDFSLQKTKMKLGVQVVITDPEKLDQIRQRESDITKERIQKILATGANVILTTGGIDDMCLKYFVEAGAMAVRRVLKRDLKRIAKASGATILSTLANLEGEETFEAAMLGQAEEVVQERICDDELILIKNTKARTSASIILRGANDFMCDEMERSLHDALCVVKRVLESKSVVPGGGAVEAALSIYLENYATSMGSREQLAIAEFARSLLVIPNTLAVNAAQDSTDLVAKLRAFHNEAQVNPERKNLKWIGLDLSNGKPRDNKQAGVFEPTIVKVKSLKFATEAAITILRIDDLIKLHPESKDDKHGSYEDAVHSGALND

SEQ ID NO: 416 - protein, 556 aa, Homo sapiens; identical to SEQ ID NO: 415

SEQ ID NO: 417 - protein, 97 aa, Homo sapiens
MMVRAAETMTTGSEPAFILLLLPPSALRCLQARQSSSSQPTGLPRAGPELRTGIPRARISSASPARGGSQHSSDGSFCSRRLREVLCVSPGASHSLA

SEQ ID NO: 418 - protein, 92 aa, Homo sapiens
QGGGRIKSIILRQTSALRELLPPKKAGTWADCVSPPCGERDRCEGWADRHTACSSPASPPQHRAKSFKKDLGHCLFLREERPACAPRLTGPV

SEQ ID NO: 419 - protein, 84 aa, Homo sapiens
AECVAAAIRHFSFLPLYEEGCVCFPLCHDCKFPEASSALQNWLEQCILGSLKEAVEMSPRRETRRAPQAHQLFVGSLQTCHSSG

SEQ ID NO: 420 - protein, 114 aa, Homo sapiens [sequence omitted]

SEQ ID NO: 421 - protein, 425 aa, Homo sapiens
MAQADIVLIGLAVMGQNLILTMKDHGFVVCAFNRTVSEVDDFLANEAKGTKVVGAQSLKEMVSKLKKPQRIILLVKAGQAVDYFIKKLIPLLDIGDIIIDGGNSEYRDTTRRCQDLKAKGILFVGSGVSGGEEGAWIEYGDMQLICEAYHLMKDVLGMAQDKMAQAFEDWNKTELDSFLIEITANILKFQGADGKHLLPKIRDSAGQKGMGKWTTISALEYGIPVTLIGEAVFAWCLSSLKDGRIQASKKLKGPQKFQFDGFMLLRQGATEFGWTLNYGDIALMWRGGCIIRSVFLGKIKDAFDRNPEPQNLLLDDFLSQLLKTARTLGGGQSALGSRLAFPCPVLSLPSPSMTSTDTRCFQPTSSRLSGIPLGLTPMNSWPNQGSLSTPTGQATVAVYHPRHTMPDDDDAAPVTLHDSTDQDIP

SEQ ID NO: 422 - protein, 531 aa, Homo sapiens
MYPTSLAVISMTFSNYVLQPVFPNCIPPTTASRVLSMACLMLLTWVNSSSVRWATRIQDMFTGGKLLALSLIIGVGLLQIFQGHFEELRPSNAFAFWMTPSVGHLALAFLQGSFAFSGWNFLNYVTEEMVDARKNLPRAIFISIPLVTFVYTFTNIAYFTAMSPQELLSSNAVAVVSGPLLGPWLLPRPLPRPYTWPLYCAHPDLRGEAAGLLFLGHACLRGSVNLRRDQWLPVHLLQVTALGRRGHGEGRLGCRCAPVMPWARGRDTCRGRGLPEAGMMIPHGNKCLITTGRQRKQEAGRLDEGENCPVGLLGPEQEVRGDSLRGTSGPKLRPRMWPVPISVPNARLCFSGAREGHLPSLLAMIHVRHCTPIPALLVCCGATAVIMLVGDTYTLINYVSFINYLCYGVTILGLLLLRWRRPALHRPIKVNLLIPVAYLVFWAFLLVFSFISEPMVCGVGVIIILTGVPIFFLGVFWRSKPKCVHRLTESMTHWGQELCFVVYPQDAPEEEENGPCPPSLLPATDKPSKPQ

SEQ ID NO: 423 - protein, 370 aa, Homo sapiens
MSPQELLSSNAVAVVSGPLLGPWLLPRPLPRPYTWPLYCAHPDLRGEAAGLLFLGHACLRGSVNLRRDQWLPVHLLQVTALGRRGHGEGRLGCRCAPVMPWARGRDTCRGRGLPEAGMMIPHGNKCLITTGRQRKQEAGRLDEGENCPVGLLGPEQEVRGDSLRGTSGPKLRPRMWPVPISVPNARLCFSGAREGHLPSLLAMIHVRHCTPIPALLVCCGATAVIMLVGDTYTLINYVSFINYLCYGVTILGLLLLRWRRPALHRPIKVNLLIPVAYLVFWAFLLVFSFISEPMVCGVGVIIILTGVPIFFLGVFWRSKPKCVHRLTESMTHWGQELCFVVYPQDAPEEEENGPCPPSLLPATDKPSKPQ

SEQ ID NO: 424 - protein, 523 aa, Homo sapiens
MAGHTQQPSGRGNPRPAPSPSPVPGTVPGASERVALKKEIGLLSACTIIIGNIIGSGIFISPKGVLEHSGSVGLALFVWVLGGGVTALGSLCYAELGVAIPKSGGDYAYVTEIFGGLAGFLLLWSAVLIMYPTSLAVISMTFSNYVLQPVFPNCIPPTTASRVLSMACLMLLTWVNSSSVRWATRIQDMFTGGKLLALSLIIGVGLLQIFQGHFEELRPSNAFAFWMTPSVGHLALAFLQGSFAFSGWNFLNYVTEEMVDARKNLPRAIFISIPLVTFVYTFTNIAYFTAMSPQELLSSNAVAVTFGEKLLGYFSWVMPVSVALSTFGGINGYLFTYSRLCFSGAREGHLPSLLAMIHVRHCTPIPALLVCCGATAVIMLVGDTYTLINYVSFINYLCYGVTILGLLLLRWRRPALHRPIKVNLLIPVAYLVFWAFLLVFSFISEPMVCGVGVIIILTGVPIFFLGVFWRSKPKCVHRLTESMTHWGQELCFVVYPQDAPEEEENGPCPPSLLPATDKPSKPQ

SEQ ID NO: 425 - protein, 770 aa, Homo sapiens
MEKRAAAGLEGAPGARAQLAVVCLVNIFLTGRLSSAVPALAACSGKLEQHTERRGVIYSPAWPLNYPPGTNCSWYIQGDRGDMITISFRNFDVEESHQCSLDWLLLGPAAPPRQEAFRLCGSAIPPAFISARDHVWIFFHSDASSSGQAQGFRLSYIRGKLGQASCQADEFRCDNGKCLPGPWQCNTVDECGDGSDEGNCSAPASEPPGSLCPGGTFPCSGARSTRCLPVERRCDGLQDCGDGSDEAGCPDLACGRRLGSFYGSFASPDLFGAARGPSDLHCTWLVDTQDSRRVLLQLELRLGYDDYVQVYEGLGERGDRLLQTLSYRSNHRPVSLEAAQGRLTVAYHARARSAGHGFNATYQVKGYCLPWEQPCGSSSDSDGGSLGDQGCFSEPQRCDGWWHCASGRDEQGCPACPPDQYPCEGGSGLCYTPADRCNNQKSCPDGADEKNCFSCQPGTFHCGTNLCIFETWRCDGQEDCQDGSDEHGCLAAVPRKVITAALIGSLVCGLLLVIALGCAFKLYSLRTQEYRAFETQMTRLEAEFVRREAPPSYGQLIAQGLIPPVEDFPVYSASQASVLQNLRTAMRRQMRRHASRRGPSRRRLGRLWNRLFHRPRAPRGQIPLLTAARPSQTVLGDGFLQPAPGAAPDPPAPLMDTGSTRAAGDRPPSAPGRAPEVGPSGPPLPSGLRDPECRPVDKDRKVCREPLADGPAPADAPREPCSAQDPHPQVSTASSTLGPHSPEPLGVCRNPPPPCSPMLEASDDEALLVC

SEQ ID NO: 426 - protein, 407 aa, Homo sapiens
MDSPCQPQPLSQALPQLPGSSSEPLEPEPGRARMGVESYLPCPLLPSYHCPGVPSEASAGSGTPRATATSTTASPLRDGFGGQDGGELRPLQSEGAAALVTKGCQRLAAQGARPEAPKRKWAEDGGDAPSPSKRPWARQENQEAEREGGMSCSCSSGSGEASAGLMEEALPSAPERLALDYIVPCMRYYGICVKDSFLGAALGGRVLAEVEALKRGGRLRDGQLVSQRAIPPRSIRGDQIAWVEGHEPGCRSIGALMAHVDAVIRHCAGRLGSYVINGRTKAMVACYPGNGLGYVRHVDNPHGDGRCITCIYYLNQNWDVKVHGGLLQIFPEGRPVVANIEPLFDRLLIFWSDRRNPHEVKPAYATRYAITVWYFDAKERAAAKDKYQLASGQKGVQVPVSQPPTPT

SEQ ID NO: 427 - protein, 407 aa, Homo sapiens; identical to SEQ ID NO: 426

SEQ ID NO: 428 - protein, 407 aa, Homo sapiens; identical to SEQ ID NO: 426

SEQ ID NO: 429 - protein, 158 aa, Homo sapiens
MCLPSPSKPTSLHPCQAMVACYPGNGLGYVRHVDNPHGDGRCITCIYYLNQNWDVKVGVRVRVRVALGLGLGRGWRASTPFSTLSPDSGILLFLFSTHSGQCDLPALPGKWHLLLSSGLCGGNSPLSGNGAVCPAPPGLVMNTFPLFLSLVASCPSPW

SEQ ID NO: 430 - protein, 407 aa, Homo sapiens; identical to SEQ ID NO: 426

SEQ ID NO: 431 - protein, 3000 aa, Homo sapiens
MTFKYNRQSMTLSSEVQIPDFDVDLGTILRVNDESTEGKTSYRLTLDIQNKKITEVALMGHLSCDTKEERKIKGVISIPRLQAEARSEILAHWSPAKLLLQMDSSATAYGSTVSKRVAWHYDEEKIEFEWNTGTNVDTKKMTSNFPVDLSDYPKSLHMYANRLLDHRVPQTDMTFRHVGSKLIVAMSSWLQKASGSLPYTQTLQDHLNSLKEFNLQNMGLPDFHIPENLFLKSDGRVKYTLNKNSLKIEIPLPFGGKSSRDLKMLETVRTPALHFKSVGFHLPSREFQVPTFTIPKLYQLQVPLLGVLDLSTNVYSNLYNWSASYSGGNTSTDHFSLRARYHMKADSVVDLLSYNVQGSGETTYDHKNTFTLSCDGSLRHKFLDSNIKFSHVEKLGNNPVSKGLLIFDASSSWGPQMSASVHLDSKKKQHLFVKEVKIDGQFRVSSFYAKGTYGLSCQRDPNTGRLNGESNLRFNSSYLQGTNQITGRYEDGTLSLTSTSDLQSGIIKNTASLKYENYELTLKSDTNGKYKNFATSNKMDMTFSKQNALLRSEYQADYESLRFFSLLSGSLNSHGLELNADILGTDKINSGAHKATLRIGQDGISTSATTNLKCSLLVLENELNAELGLSGASMKLTTNGRFREHNAKFSLDGKAALTELSLGSAYQAMILGVDSKNIFNFKVSQEGLKLSNDMMGSYAEMKFDHTNSLNIAGLSLDFSSKLDNIYSSDKFYKQTVNLQLQPYSLVTTLNSDLKYNALDLTNNGKLRLEPLKLHVAGNLKGAYQNNEIKHIYAISSAALSASYKADTVAKVQGVEFSHRLNTDIAGLASAIDMSTNYNSDSLHFSNVFRSVMAPFTMTIDAHTNGNGKLALWGEHTGQLYSKFLLKAEPLAFTFSHDYKGSTSHHLVSRKSISAALEHKVSALLTPAEQTGTWKLKTQFNNNEYSQDLDAYNTKDKIGVELTGRTLADLTLLDSPIKVPLLLSEPINIIDALEMRDAVEKPQEFTIVAFVKYDKNQDVHSINLPFFETLQEYFERNRQTIIVVLENVQRNLKHINIDQFVRKYRAALGKLPQQANDYLNSFNWERQVSHAKEKLTALTKKYRITENDIQIALDDAKINFNEKLSQLQTYMIQFDQYIKDSYDLHDLKIAIANIIDEIIEKLKSLDEHYHIRVNLVKTIHDLHLFIENIDFNKSGSSTASWIQNVDTKYQIRIQIQEKLQQLKRHIQNIDIQHLAGKLKQHIEAIDVRVLLDQLGTTISFERINDVLEHVKHFVINLIGDFEVAEKINAFRAKVHELIERYEVDQQIQVLMDKLVELAHQYKLKETIQKLSNVLQQVKIKDYFEKLVGFIDDAVKKLNELSFKTFIEDVNKFLDMLIKKLKSFDYHQFVDETNDKIREVTQRLNGEIQALELPQKAEALKLFLEETKATVAVYLESLQDTKITLIINWLQEALSSASLAHMKAKFRETLEDTRDRMYQMDIQQELQRYLSLVGQVYSTLVTYISDWWTLAAKNLTDFAEQYSIQDWAKRMKALVEQGFTVPEIKTILGTMPAFEVSLQALQKATFQTPDFIVPLTDLRIPSVQINFKDLKNIKIPSRFSTPEFTILNTFHIPSFTIDFVEMKVKIIRTIDQMLNSELQWPVPDIYLRDLKVEDIPLARITLPDFRLPEIAIPEFIIPTLNLNDFQVPDLHIPEFQLPHISHTIEVPTFGKLYSILKIQSPLFTLDANADIGNGTTSANEAGIAASITAKGESKLEVLNFDFQANAQLSNPKINPLALKESVKFSSKYLRTEHGSEMLFFGNAIEGKSNTVASLHTEKNTLELSNGVIVKINNQLTLDSNTKYFHKLNIPKLDFSSQADLRNEIKTLLKAGHIAWTSSGKGSWKWACPRFSDEGTHESQISFTIEGPLTSFGLSNKINSKHLRVNQNLVYESGSLNFSKLEIQSQVDSQHVGHSVLTAKGMALFGEGKAEFTGRHDAHLNGKVIGTLKNSLFFSAQPFEITASTNNEGNLKVRFPLRLTGKIDFLNNYALFLSPSAQQASWQVSARFNQYKYNQNFSAGNNENIMEAHVGINGEANLDFLNIPLTIPEMRLPYTIITTPPLKDFSLWEKTGLKEFLKTTKQSFDLSVKAQYKKNKHRHSITNPLAVLCEFISQSIKSFDRHFEKNRNNALDFVTKSYNETKIKFDKYKAEKSHDELPRTFQIPGYTVPVVNVEVSPFTIEMSAFGYVFPKAVSMPSFSILGSDVRVPSYTLILPSLELPVLHVPRNLKLSLPDFKELCTISHIFIPAMGNITYDFSFKSSVITLNTNAELFNQSDIVAHLLSSSSSVIDALQYKLEGTTRLTRKRGLKLATALSLSNKFVEGSHNSTVSLTTKNMEVSVATTTKAQIPILRMNFKQELNGNTKSKPTVSSSMEFKYDFNSSMLYSTAKGAVDHKLSLESLTSYFSIESSTKGDVKGSVLSREYSGTIASEANTYLNSKSTRSSVKLQGTSKIDDIWNLEVKENFAGEATLQRIYSLWEHSTKNHLQLEGLFFTNGEHTSKATLELSPWQMSALVQVHASQPSSFHDFPDLGQEVALNANTKNQKIRWKNEVRIHSGSFQSQVELSNDQEKAHLDIAGSLEGHLRFLKNIILPVYDKSLWDFLKLDVTTSIGRRQHLRVSTAFVYTKNPNGYSFSIPVKVLADKFIIPGLKLNDLNSVLVMPTFHVPFTDLQVPSCKLDFREIQIYKKLRTSSFALNLPTLPEVKFPEVDVLTKYSQPEDSLIPFFEITVPESQLTVSQFTLPKSVSDGIAALDLNAVANKIADFELPTIIVPEQTIEIPSIKFSVPAGIVIPSFQALTARFEVDSPVYNATWSASLKNKADYVETVLDSTCSSTVQFLEYELNVLGTHKIEDGTLASKTKGTFAHRDFSAEYEEDGKYEGLQEWEGKAHLNIKSPAFTDLHLRYQKDKKGISTSAASPAVGTVGMDMDEDDDFSKWNFYYSPQSSPDKKLTLIGKKRQLLAC

SEQ ID NO: 432 - protein, 4563 aa, Homo sapiens [sequence omitted]

SEQ ID NO: 433 - protein, 4563 aa, Homo sapiens [sequence omitted]

SEQ ID NO: 434 - protein, 732 aa, Homo sapiens [sequence omitted]

SEQ ID NO: 435 - protein, 619 aa, Homo sapiens [sequence omitted]

SEQ ID NO: 436 - protein, 1309 aa, Homo sapiens
MEPALNINGLIDFAIQLLNELSVVEAELLLKSSSLAGSYTTGLCVCIVAVLRRYHSCLILNPDQTAQVFEGLCGVVKHVVNPSECSSPERCILAYLYDLYVSCSHLRSKFGDLFSSACSKVKQTIYNNVMPANSNLRWDPDFMMDFIENPSARSINYSMLGKILSDNAANRYSFVCNTLMNVCMGHQDAGRINDIANFSSELTACCTVLSSEWLGVLKALCCSSNHVWGFNDVLCTVDVSDLSFHDSLATFIAILIARQCFSLEDVVQHVALPSLLAAACGDADAEPGARMTCRLLLHLFRAPQACFLPQATGKPFPGIRSSCDRHLLAAAHNSIEVGAVFAVLKAIMMLGDAKIGNNSVSSLKNDDFTMRGLRCDGNADDIWTASQNPKSCGKSISIETANLREYARYVLRTICQQEWVGEHCLKEPERLCTDKELILDPVLSNMQAQKLLQLICYPHGIKECTEGDNLQRQHIKRILQNLEQWTLRQSWLELQLMIKQCLKDPGSGSVAEMNNLLDNIAKATIEVFQQSADLNNSSNSGMSLFNPNSIGSADTSSTRQNGIKTFLSSSERRGVWLVAPLIARLPTSVQGRVLKAAGEELEKGQHLGSSSKKERDRQKQKSMSLLSQQPFLSLVLTCLKGQDEQREGLLTSLQNQVNQILSNWREERYQDDIKARQMMHEALQLRLNLVGGMFDTVQRSTQWTTDWALLLLQIITSGTVDMHTNNELFTTVLDMLGVLINGTLASDLSNASPGGSEENKRAYMNLVKKLKKELGDKRSESIDKVRQLLPLPKQTCDVITCEPMGSLIDTKGNKIAGFDSIDKKQGLQVSTKQKVSPWDLFEGQKNPAPLSWAWFGTVRVDRRVIKYEEQHHLLLYHTHPMPKPRSYYLQPLPLPPEEEEEEPTSPVSQEPERKSAELSDQGKTTTDEEKKTKGRKRKTKSSSRVDEYPQSNIYRVPPNYSPISSQMMHHPQSTLWGYNLVGQPQQPGFFLQNQSLTPGGSRLDPAGSFVPTNTKQALSNMLQRRSGAMMQPPSLHAITSQQQLIQMKLLQQQQQQRLLRQAQTRPFQQGQPGDQAALFAAQARPSPQLPQYPGLQQAQTMPQGYTMYGTQMPLQQTSQQQAGSVVLSPSYNSRAYPAAHSNPVLMERLRQIQQQPSGYVQQQASPYLQPLTGSQRLNHQALQQSPLVGGGIDAVLTSAHPNLPSVPLPQDPMRPRQPQVRQQQRLLQMQQPQQPQPQQPPQPQQSSQSQSQTLGLQAMQPQQPLFPRQGLQQTQQQQQTAALVRQLQKQLSSNQPQQGVTPYGHPSHF

SEQ ID NO: 437 - protein, 731 aa, Homo sapiens
MSWFVDLAGKAEDLLNRVDQGAATALSRKDNASNIYSKNTDYTELHQQNTDLIYQTGPKSTYISSAADNIRNQKATILAGTANVKVGSRTPVEASHPVENASVPRPSSHFVRRKKSEPDDELLFDFLNSSQKEPTGRVEIRKEKGKTPVFQSSQTSSVSSVNPSVTTIKTIEENSFGSQTHEAASNSDSSHEGQEESSKENVSSNAACPDHTPTPNDDGKSHELSNLRLENQLLRNEVQSLNQEMASLLQRSKETQEELNKARARVEKWNADHSKSDRMTRGLRAQVDDLTEAVAAKDSQLAVLKVRLQEADQLLSTRTEALEALQSEKSRIMQDQSEGNSLQNQALQTLQERLHEADATLKREQESYKQMQSEFAARLNKVEMERQNLAEAITLAERKYSDEKKRVDELQQQVKLYKLNLESSKQELIDYKQKATRILQSKEKLINSLKEGSGFEGLDSSTASSMELEELRHEKEMQREEIQKLMGQIHQLRSELQDMEAQQVNEAESAREQLQDLHDQIAGQKASKQELETELERLKQEFHYIEEDLYRTKNTLQSRIKDRDEEIQKLRNQLTNKTLSNSSQSELENRLHQLTETLIQKQTMLESLSTEKNSLVFQLERLEQQMNSASGSSSNGSSINMSGIDNGEGTRLRNVPVLFNDTETNLAGMYGKVRKAASSIDQFSIRLGIFLRRYPIARVFVIIYMALLHLWVMIVLLTYTPEMHHDQPYGK

SEQ ID NO: 438 - protein, 317 aa, Homo sapiens [sequence omitted]

SEQ ID NO: 439 - protein, 1089 aa, Homo sapiens
MGTSHPAFLVLGCLLTGLSLILCQLSLPSILPNENEKVVQLNSSFSLRCFGESEVSWQYPMSEEESSDVEIRNEENNSGLFVTVLEVSSASAAHTGLYTCYYNHTQTEENELEGRHIYIYVPDPDVAFVPLGMTDYLVIVEDDDSAIIPCRTTDPETPVTLHNSEGVVPASYDSRQGFNGTFTVGPYICEATVKGKKFQTIPFNVYALKATSELDLEMEALKTVYKSGETIVVTCAVFNNEVVDLQWTYPGEVKGKGITMLEEIKVPSIKLVYTLTVPEATVKDSGDYECAARQATREVKEMKKVTISVHEKGFIEIKPTFSQLEAVNLHEVKHFVVEVRAYPPPRISWLKNNLTLIENLTEITTDVEKIQEIRYRSKLKLIRAKEEDSGHYTIVAQNEDAVKSYTFELLTQVPSSILDLVDDHHGSTGGQTVRCTAEGTPLPDIEWMICKDIKKCNNETSWTILANNVSNIITEIHSRDRSTVEGRVTFAKVEETIAVRCLAKNLLGAENRELKLVAPTLRSELTVAAAVLVLLVIVIISLIVLVVIWKQKPRYEIRWRVIESISPDGHEYIYVDPMQLPYDSRWEFPRDGLVLGRVLGSGAFGKVVEGTAYGLSRSQPVMKVAVKMLKPTARSSEKQALMSELKIMTHLGPHLNIVNLLGACTKSGPIYIITEYCFYGDLVNYLHKNRDSFLSHHPEKPKKELDIFGLNPADESTRSYVILSFENNGDYMDMKQADTTQYVPMLERKEVSKYSDIQRSLYDRPASYKKKSMLDSEVKNLLSDDNSEGLTLLDLLSFTYQVARGMEFLASKNCVHRDLAARNVLLAQGKIVKICDFGLARDIMHDSNYVSKGSTFLPVKWMAPESIFDNLYTTLSDVWSYGILLWEIFSLGGTPYPGMMVDSTFYNKIKSGYRMAKPDHATSEVYEIMVKCWNSEPEKRPSFYHLSEIVENLLPGQYKKSYEKIHLDFLKSDHPAVARMRVDSDNAYIGVTYKNEEDKLKDWEGGLDEQRLSADSGYIIPLPDIDPVPEEEDLGKRNRHSSQTSEESAIETGSSSSTFIKREDETIEDIDMMDDIGIDSSDLVEDSFL

SEQ ID NO: 440 - protein, 218 aa, Homo sapiens
MGTSHPAFLVLGCLLTGLSLILCQLSLPSILPNENEKVVQLNSSFSLRCFGESEVSWQYPMSEEESSDVEIRNEENNSGLFVTVLEVSSASAAHTGLYTCYYNHTQTEENELEGRHIYIYVPDPDVAFVPLGMTDYLVIVEDDDSAIIPCRTTDPETPVTLHNSEGVVPASYDSRQGFNGTFTVGPYICEATVKGKKFQTIPFNVYALKGTCIISFLL

SEQ ID NO: 441 - protein, 114 aa, Homo sapiens [sequence omitted]

SEQ ID NO: 442 - protein, 389 aa, Homo sapiens [sequence omitted]

SEQ ID NO: 443 - protein, 388 aa, Homo sapiens
MSAPSTLPPGGEEGLGTAWPSAANASSAPAEAEEAVAGPGDARAAGMVAIQCIYALVCLVGLVGNALVIFVILRYAKMKTATNIYLLNLAVADELFMLSVPFVASSAALRHWPFGSVLCRAVLSVDGLNMFTSVFCLTVLSVDRYVAVVHPLRAATYRRPSVAKLINLGVWLASLLVTLPIAIFADTRPARGGQAVACNLQWPHPAWSAVFVVYTFLLGFLLPVLAIGLCYLLIVGKMRAVALRAGWQQRRRSEKKITRLVLMVVVVFVLCWMPFYVVQLLNLFVTSLDATVNHVSLILSYANSCANPILYGFLSDNFRRFFQRVLCLRCCLLEGAGGAEEEPLDYYATALKSKGGAGCMCPPLPCQQEALQPEPGRKRIPLTRTTTF

SEQ ID NO: 444 - protein, 216 aa, Homo sapiens
MLPCPIPFSPSRLLIPPFPSFPSNYQLWLGRHNLFDDENTAQFVHVSESFPHPGFNMSLLENHTRQADEDYSHDLMLLRLTEPADTITDAVKVVELPTEEPEVGSTCLASGWGSIEPENFSFPDDLQCVDLKILPNDECKKAHVQKVTDFMLCVGHLEGGKDTCVGDSGGPLMCDGVLQGVTSWGYVPCGTPNKPSVAVRVLSYVKWIEDTIAENS

SEQ ID NO: 445 - protein, 262 aa, Homo sapiens
MWFLVLCLALSLGGTGAAPPIQSRIVGGWECEQHSQPWQAALYHFSTFQCGGILVHRQWVLTAAHCISDNYQLWLGRHNLFDDENTAQFVHVSESFPHPGFNMSLLENHTRQADEDYSHDLMLLRLTEPADTITDAVKVVELPTEEPEVGSTCLASGWGSIEPENFSFPDDLQCVDLKILPNDECKKAHVQKVTDFMLCVGHLEGGKDTCVGDSGGPLMCDGVLQGVTSWGYVPCGTPNKPSVAVRVLSYVKWIEDTIAENS

SEQ ID NO: 446 - protein, 334 aa, Homo sapiens [sequence omitted]

SEQ ID NO: 447 - protein, 335 aa, Homo sapiens
MLGIWTLLPLVLTSVARLSSKSVNAQVTDINSKGLELRKTVTTVETQNLEGLHHDGQFCHKPCPPGERKARDCTVNGDEPDCVPCQEGKEYTDKAHFSSKCRRCRLCDEGHGLEVEINCTRTQNTKCRCKPNFFCNSTVCEHCDPCTKCEHGIIKECTLTSNTKCKEEGSRSNLGWLCLLLLPIPLIVWVKRKEVQKTCRKHRKENQGSHESPTLNPETVAINLSDVDLSKYITTIAGVMTLSQVKGFVRKNGVNEAKIDEIKNDNVQDTAEQKVQLLRNWHQLHGKKEAYDTLIKDLKKANLCTLAEKIQTIILKDITSDSENSNFRNEIQSLV

SEQ ID NO: 448 - protein, 149 aa, Homo sapiens
MLGIWTLLPLVLTSVARLSSKSVNAQVTDINSKGLELRKTVTTVETQNLEGLHHDGQFCHKPCPPGERKARDCTVNGDEPDCVPCQEGKEYTDKAHFSSKCRRCRLCDEGHDVNMESSRNAHSPATPSAKRKDPDLTWGGFVFFFCQFH

SEQ ID NO: 449 - protein, 201 aa, Homo sapiens [sequence omitted]

SEQ ID NO: 450 - protein, 103 aa, Homo sapiens
MLGIWTLLPLVLTSVARLSSKSVNAQVTDINSKGLELRKTVTTVETQNLEGLHHDGQFCHKPCPPDVNMESSRNAHSPATPSAKRKDPDLTWGGFVFFFCQFH

SEQ ID NO: 451 - protein, 313 aa, Homo sapiens [sequence omitted]

SEQ ID NO: 452 - protein, 149 aa, Homo sapiens; identical to SEQ ID NO: 448

SEQ ID NO: 453 - protein, 103 aa, Homo sapiens; identical to SEQ ID NO: 450

SEQ ID NO: 454 - protein, 705 aa, Homo sapiens [sequence omitted]

SEQ ID NO: 455 - protein, 706 aa, Homo sapiens
MSPFLRIGLSNFDCGSCQSCQGEAVNPYCAVLVKEYVESENGQMYIQKKPTMYPPWDSTFDAHINKGRVMQIIVKGKNVDLISETTVELYSLAERCRKNNGKTEIWLELKPQGRMLMNARYFLEMSDTKDMNEFETEGFFALHQRRGAIKQAKVHHVKCHEFTATFFPQPTFCSVCHEFVWGLNKQGYQCRQCNAAIHKKCIDKVIAKCTGSAINSRETMFHKERFKIDMPHRFKVYNYKSPTFCEHCGTLLWGLARQGLKCDACGMNVHHRCQTKVANLCGINQKLMAEALAMIESTQQARCLRDTEQIFREGPVEIGLPCSIKNEARPPCLPTPGKREPQGISWESPLDEVDKMCHLPEPELNKERPSLQIKLKIEDFILHKMLGKGSFGKVFLAEFKKTNQFFAIKALKKDVVLMDDDVECTMVEKRVLSLAWEHPFLTHMFCTFQTKENLFFVMEYLNGGDLMYHIQSCHKFDLSRATFYAAEIILGLQFLHSKGIVYRDLKLDNILLDKDGHIKIADFGMCKENMLGDAKTNTFCGTPDYIAPEILLGQKYNHSVDWWSFGVLLYEMLIGQSPFHGQDEEELFHSIRMDNPFYPRWLEKEAKDLLVKLFVREPEKRLGVRGDIRQHPLFREINWEELERKEIDPPFRPKVKSPFDCSNFDKEFLNEKPRLSFADRALINSMDQNMFRNFSFMNPGMERLIS

SEQ ID NO: 456 - protein, 460 aa, Homo sapiens [sequence omitted]

SEQ ID NO: 457 - protein, 706 aa, Homo sapiens; identical to SEQ ID NO: 455

SEQ ID NO: 458 - protein, 727 aa, Homo sapiens
MESKTEKWMERIHLNVSERPFPPHIQLPPEIQESQEVTLTCLLNFSCYGYPIQLQWLLEGVPMRQAAVTSTSLTIKSVFTRSELKFSPQWSHHGKIVTCQLQDADGKFLSNDTVQLNVKHTPKLEIKVTPSDAIVREGDSVTMTCEVSSSNPEYTTVSWLKDGTSLKKQNTFTLNLREVTKDQSGKYCCQVSNDVGPGRSEEVFLQVQYAPEPSTVQILHSPAVEGSQVEFLCMSLANPLPTNYTWYHNGKEMQGRTEEKVHIPKILPWHAGTYSCVAENILGTGQRGPGAELDVQYPPKKVTTVIQNPMPIREGDTVTLSCNYNSSNPSVTRYEWKPHGAWEEPSLGVLKIQNVGWDNTTIACAACNSWCSWASPVALNVQYAPRDVRVRKIKPLSEIHSGNSVSLQCDFSSSHPKEVQFFWEKNGRLLGKESQLNFDSISPEDAGSYSCWVNNSIGQTASKAWTLEVLYAPRRLRVSMSPGDQVMEGKSATLTCESDANPPVSHYTWFDWNNQSLPYHSQKLRLEPVKVQHSGAYWCQGTNSVGKGRSPLSTLTVYYSPETIGRRVAVGLGSCLAILILAICGLKLQRRWKRTQSQQGLQENSSGQSFFVRNKKVRRAPLSEDPHSLGCYNPMMEDGISYTTLRFPEMNIPRTGDAESSEMQRPPPDCDDTVTYSALHKRQVGDYENVIPDFPEDEGIHYSELIQFGVGERPQAQENVDYVILKH

SEQ ID NO: 459 - protein, 114 aa, Homo sapiens [sequence omitted]

SEQ ID NO: 460 - protein, 782 aa, Homo sapiens
MHLLGPWLLLLVLEYLAFSDSSKWVFEHPETLYAWEGACVWIPCTYRALDGDLESFILFHNPEYNKNTSKFDGTRLYESTKDGKVPSEQKRVQFLGDKNKNCTLSIHPVHLNDSGQLGLRMESKTEKWMERIHLNVSERPFPPHIQLPPEIQESQEVTLTCLLNFSCYGYPIQLQWLLEGVPMRQAAVTSTSLTIKSVFTRSELKFSPQWSHHGKIVTCQLQDADGKFLSNDTVQLNVKHTPKLEIKVTPSDAIVREGDSVTMTCEVSSSNPEYTTVSWLKDGTSLKKQNTFTLNLREVTKDQSGKYCCQVSNDVGPGRSEEVFLQVQYAPEPSTVQILHSPAVEGSQVEFLCMSLANPLPTNYTWYHNGKEMQGRTEEKVHIPKILPWHAGTYSCVAENILGTGQRGPGAELDVQYPPKKVTTVIQNPMPIREGDTVTLSCNYNSSNPSVTRYEWKPHGAWEEPSLGVLKIQNVGWDNTTIACAACNSWCSWASPVALNVQYAPRDVRVRKIKPLSEIHSGNSVSLQCDFSSSHPKEVQFFWEKNGRLLGKESQLNFDSISPEDAGSYSCWVNNSIGQTASKAWTLEVLYAPRRLRVSMSPGDQVMEGKSATLTCESDANPPVSHYTWFDWNNQSLPYHSQKLRLEPVKVQHSGAYWCQGTNSVGKGRSPLSTLTVYYSPETIGRRVAVGLGSCLAILILAICGLKLQRRDAESSEMQRPPPDCDDTVTYSALHKRQVGDYENVIPDFPEDEGIHYSELIQFGVGERPQAQENVDYVILKH

SEQ ID NO: 461 - protein, 488 aa, Homo sapiens
MRQAAVTSTSLTIKSVFTRSELKFSPQWSHHGKIVTCQLQDADGKFLSNDTVQLNVKHPPKKVTTVIQNPMPIREGDTVTLSCNYNSSNPSVTRYEWKPHGAWEEPSLGVLKIQNVGWDNTTIACAACNSWCSWASPVALNVQYAPRDVRVRKIKPLSEIHSGNSVSLQCDFSSSHPKEVQFFWEKNGRLLGKESQLNFDSISPEDAGSYSCWVNNSIGQTASKAWTLEVLYAPRRLRVSMSPGDQVMEGKSATLTCESDANPPVSHYTWFDWNNQSLPYHSQKLRLEPVKVQHSGAYWCQGTNSVGKGRSPLSTLTVYYSPETIGRRVAVGLGSCLAILILAICGLKLQRRWKRTQSQQGLQENSSGQSFFVRNKKVRRAPLSEDPHSLGCYNPMMEDGISYTTLRFPEMNIPRTGDAESSEMQRPPPDCDDTVTYSALHKRQVGDYENVIPDFPEDEGIHYSELIQFGVGERPQAQENVDYVILKH

SEQ ID NO: 462 - protein, 847 aa, Homo sapiens [sequence omitted]

SEQ ID NO: 463 - protein, 847 aa, Homo sapiens [sequence omitted]

SEQ ID NO: 464 - protein, 493 aa, Homo sapiens [sequence omitted]

SEQ ID NO: 465 - protein, 433 aa, Homo sapiens
MLAATVLTLALLGNAHACSKGTSHEAGIVCRITKPALLVLNHETAKVIQTAFQRASYPDITGEKAMMLLGQVKYGLHNIQISHLSIASSQVELVEAKSIDVSIQNVSVVFKGTLKYGYTTAWWLGIDQSIDFEIDSAIDLQINTQLTCDSGRVRTDAPDCYLSFHKLLLHLQGEREPGWIKQLFTNFISFTLKLVLKGQICKEINVISNIMADFVQTRAASILSDGDIGVDISLTGDPVITASYLESHHKAVLETWGFNTNQEIFQEVVGGFPSQAQVTVHCLKMPKISCQNKGVVVNSSVMVKFLFPRPDQQHSVAYTFEEDIVTTVQASYSKKKLFLSLLDFQITPKTVSNLTESSSESVQSFLQSMITAVGIPEVMSRLEVVFTALMNSKGVSLFDIINPEIITRDGFLLLQMDFGFPEHLLVDFLQSLS

SEQ ID NO: 466 - protein, 669 aa, Homo sapiens
MEGNKLEEQDSSPPQSTPGLMKGNKREEQGLGPEPAAPQQPTAEEEALIEFHRSYRELFEFFCNNTTIHGAIRLVCSQHNRMKTAFWAVLWLCTFGMMYWQFGLLFGEYFSYPVSLNINLNSDKLVFPAVTICTLNPYRYPEIKEELEELDRITEQTLFDLYKYSSFTTLVAGSRSRRDLRGTLPHPLQRLRVPPPPHGARRARSVASSLRDNNPQVDWKDWKIGFQLCNQNKSDCFYQTYSSGVDAVREWYRFHYINILSRLPETLPSLEEDTLGNFIFACRFNQVSCNQANYSHFHHPMYGNCYTFNDKNNSNLWMSSMPGINNGLSLMLRAEQNDFIPLLSTVTGARVMVHGQDEPAFMDDGGFNLRPGVETSISMRKETLDRLGGDYGDCTKNGSDVPVENLYPSKYTQQVCIHSCFQESMIKECGCAYIFYPRPQNVEYCDYRKHSSWGYCYYKLQVDFSSDHLGCFTKCRKPCSVTSYQLSAGYSRWPSVTSQEWVFQMLSRQNNYTVNNKRNGVAKVNIFFKELNYKTNSESPSVTMVTLLSNLGSQWSLWFGSSVLSVVEMAELVFDLLVIMFLMLLRRFRSRYWSPGRGGRGAQEVASTLASSPPSHFCPHPMSLSLSQPGPAPSPALTAPPPAYATLGPRPSPGGSAGASSSTCPLGGP

SEQ ID NO: 467 - protein, 656 aa, Homo sapiens [sequence omitted]

SEQ ID NO: 468 - protein, 679 aa, Homo sapiens
MCRGCGCLPPDAPCPTLCSRNPAMVNEARGNSSLNPCLEGSASSGSESSKDSSRCSTPGLDPERHERLREKMRRRLESGDKWFSLEFFPPRTAEGAVNLISRFDRMAAGGPLYIDVTWHPAGDPGSDKETSSMMIASTAVNYCGLETILHMTCCRQRLEEITGHLHKAKQLGLKNIMALRGDPIGDQWEEEEGGFNYAVDLVKHIRSEFGDYFDICVAGYPKGHPEAGSFEADLKHLKEKVSAGADFIITQLFFEADTFFRFVKACTDMGITCPIVPGIFPIQGYHSLRQLVKLSKLEVPQEIKDVIEPIKDNDAAIRNYGIELAVSLCQELLASGLVPGLHFYTLNREMATTEVLKRLGMWTEDPRRPLPWALSAHPKRREEDVRPIFWASRPKSYIYRTQEWDEFPNGRWGNSSSPAFGELKDYYLFYLKSKSPKEELLKMWGEELTSEESVFEVFVLYLSGEPNRNGHKVTCLPWNDEPLAAETSLLKEELLRVNRQGILTINSQPNINGKPSSDPIVGWGPSGGYVFQKAYLEFFTSRETAEALLQVLKKYELRVNYHLVNVKGENITNAPELQPNAVTWGIFPGREIIQPTVVDPVSFMFWKDEAFALWIERWGKLYEEESPSRTIIQYIHDNYFLVNLVDNDFPLDNCLWQVVEDTLELLNRPTQNARETEAP

SEQ ID NO: 469 - protein, 679 aa, Homo sapiens; identical to SEQ ID NO: 468

SEQ ID NO: 470 - protein, 656 aa, Homo sapiens [sequence omitted]

SEQ ID NO: 471 - protein, 656 aa, Homo sapiens [sequence omitted]

SEQ ID NO: 472 - protein, 656 aa, Homo sapiens [sequence omitted]

SEQ ID NO: 473 - protein, 858 aa, Homo sapiens
MGDHLDLLLGVVLMAGPVFGIPSCSFDGRIAFYRFCNLTQVPQVLNTTERLLLSFNYIRTVTASSFPFLEQLQLLELGSQYTPLTIDKEAFRNLPNLRILDLGSSKIYFLHPDAFQGLFHLFELRLYFCGLSDAVLKDGYFRNLKALTRLDLSKNQIRSLYLHPSFGKLNSLKSIDFSSNQIFLVCEHELEPLQGKTLSFFSLAANSLYSRVSVDWGKCMNPFRNMVLEILDVSGNGWTVDITGNFSNAISKSQAFSLILAHHIMGAGFGFHNIKDPDQNTFAGLARSSVRHLDLSHGFVFSLNSRVFETLKDLKVLNLAYNKINKIADEAFYGLDNLQVLNLSYNLLGELYSSNFYGLPKVAYIDLQKNHIAIIQDQTFKFLEKLQTLDLRDNALTTIHFIPSIPDIFLSGNKLVTLPKINLTANLIHLSENRLENLDILYFLLRVPHLQILILNQNRFSSCSGDQTPSENPSLEQLFLGENMLQLAWETELCWDVFEGLSHLQVLYLNHNYLNSLPPGVFSHLTALRGLSLNSNRLTVLSHNDLPANLEILDISRNQLLAPNPDVFVSLSVLDITHNKFICECELSTFINWLNHTNVTIAGPPADIYCVYPDSFSGVSLFSLSTEGCDEEEVLKSLKFSLFIVCTVTLTLFLMTILTVTKFRGFCFICYKTAQRLVFKDHPQGTEPDMYKYDAYLCFSSKDFTWVQNALLKHLDTQYSDQNRFNLCFEERDFVPGENRIANIQDAIWNSRKIVCLVSRHFLRDGWCLEAFSYAQGRCLSDLNSALIMVVVGSLSQYQLMKHQSIRGFVQKQQYLRWPEDLQDVGWFLHKLSQQILKKEKEKKKDNNIPLQTVATIS

SEQ ID NO: 474 - protein, 858 aa, Homo sapiens; identical to SEQ ID NO: 473

SEQ ID NO: 475 - protein, 247 aa, Homo sapiens
MTILFLTMVISYFGCMKAAPMKEANIRGQGGLAYPGVRTHGTLESVNGPKAGSRGLTSLADTFEHVIEELLDEDQKVRPNEENNKDADLYTSRVMLSSQVPLEPPLLFLLEEYKNYLDAANMSMRVRRHSDPARRGELSVCDSISEWVTAADKKTAVDMSGGTVTVLEKVPVSKGQLKQYFYETKCNPMGYTKEGCRGIDKRHWNSQCRTTQSYVRALTMDSKKRIGWRFIRIDTSCVCTLTIKRGR

SEQ ID NO: 476 - protein, 247 aa, Homo sapiens; identical to SEQ ID NO: 475

SEQ ID NO: 477 - protein, 247 aa, Homo sapiens; identical to SEQ ID NO: 475

SEQ ID NO: 478 - protein, 494 aa, Homo sapiens
MVSKLSQLQTELLAALLESGLSKEALIQALGEPGPYLLAGEGPLDKGESCGGGRGELAELPNGLGETRGSEDETDDDGEDFTPPILKELENLSPEEAAHQKAVVETLLQEDPWRVAKMVKSYLQQHNIPQREVVDTTGLNQSHLSQHLNKGTPMKTQKRAALYTWYVRKQREVAQQFTHAGQGGLIEEPTGDELPTKKGRRNRFKWGPASQQILFQAYERQKNPSKEERETLVEECNRAECIQRGVSPSQAQGLGSNLVTEVRVYNWFANRRKEEAFRHKLAMDTYSGPPPGPGPGPALPAHSSPGLPPPALSPSKVHGVRYGQPATSETAEVPSSSGGPLVTVSTPLHQVSPTGLEPSHSLLSTEAKLVSAAGGPLPPVSTLTALHSLEQTSPGLNQQPQNLIMASLPGVMTIGPGEPASLGPTFTNTGASTLVIGKLVGMGGHLGGRLMGQPQNPGAGRATGTHSFIHSFIQHVFIQCLLWTSHCATSVIPG

SEQ ID NO: 479 - protein, 542 aa, Homo sapiens
MVSKLSQLQTELLAALLESGLSKEALIQALGEPGPYLLAGEGPLDKGESCGGGRGELAELPNGLGETRGSEDETDDDGEDFTPPILKELENLSPEEAAHQKAVVETLLQEDPWRVAKMVKSYLQQHNIPQREVVDTTGLNQSHLSQHLNKGTPMKTQKRAALYTWYVRKQREVAQQFTHAGQGGLIEEPTGDELPTKKGRRNRFKWGPASQQILFQAYERQKNPSKEERETLVEECNRAECIQRGVSPSQAQGLGSNLVTEVRVYNWFANRRKEEAFRHKLAMDTYSGPPPGPGPGPALPAHSSPGLPPPALSPSKVHGVRYGQPATSETAEVPSSSGGPLVTVSTPLHQVSPTGLEPSHSLLSTEAKLVSAAGGPLPPVSTLTALHSLEQTSPGLNQQPQNLIMASLPGVMTIGPGEPASLGPTFTNTGASTLVIGLASTQAQSVPVINSMGSSLTTLQPVQFSQPLHPSYQQPLMPPVQSHVTQSPFMATMAQLQSPHGERPVPHTAGDDDRGWLSMDAGERGAWQALQSACVSGTSVFP

SEQ ID NO: 480 - protein, 631 aa, Homo sapiens
MVSKLSQLQTELLAALLESGLSKEALIQALGEPGPYLLAGEGPLDKGESCGGGRGELAELPNGLGETRGSEDETDDDGEDFTPPILKELENLSPEEAAHQKAVVETLLQEDPWRVAKMVKSYLQQHNIPQREVVDTTGLNQSHLSQHLNKGTPMKTQKRAALYTWYVRKQREVAQQFTHAGQGGLIEEPTGDELPTKKGRRNRFKWGPASQQILFQAYERQKNPSKEERETLVEECNRAECIQRGVSPSQAQGLGSNLVTEVRVYNWFANRRKEEAFRHKLAMDTYSGPPPGPGPGPALPAHSSPGLPPPALSPSKVHGVRYGQPATSETAEVPSSSGGPLVTVSTPLHQVSPTGLEPSHSLLSTEAKLVSAAGGPLPPVSTLTALHSLEQTSPGLNQQPQNLIMASLPGVMTIGPGEPASLGPTFTNTGASTLVIGLASTQAQSVPVINSMGSSLTTLQPVQFSQPLHPSYQQPLMPPVQSHVTQSPFMATMAQLQSPHALYSHKPEVAQYTHTGLLPQTMLITDTTNLSALASLTPTKQVFTSDTEASSESGLHTPASQATTLHVPSQDPAGIQHLQPAHRLSASPTVSSSSLVLYQSSDSSNGQSHLLPSNHSVIETFISTQMASSSQ

SEQ ID NO: 481 - protein, 262 aa, Homo sapiens
MAAPSGTVSDSESSNSSSDAEELERCREAAMPAWGLEQRPHVAGKPRAGAANSQLSTSQPSLRHKVNEHEQDGNELQTTPEFRAHVAKKLGALLDSFITISEAAKEPAKAKVQKVALEDDGFRLFFTSVPGGREKEESPQPRRKRQPSSSSEDSDEEWRRCREAAVSASDILQESAIHSPGTVEKEAKKKRKLKKKAKKVASVDSAVAATTPTSMATVQKQKSGELNGDQVSLGTKKKKKAKKASETSPFPPAKSATAIPAN

SEQ ID NO: 482 - protein, 1051 aa, Homo sapiens
MGPGPSRAPRAPRLMLCALALMVAAGGCVVSAFNLDTRFLVVKEAGNPGSLFGYSVALHRQTERQQRYLLLAGAPRELAVPDGYTNRTGAVYLCPLTAHKDDCERMNITVKNDPGHHIIEDMWLGVTVASQGPAGRVLVCAHRYTQVLWSGSEDQRRMVGKCYVRGNDLELDSSDDWQTYHNEMCNSNTDYLETGMCQLGTSGGFTQNTVYFGAPGAYNWKGNSYMIQRKEWDLSEYSYKDPEDQGNLYIGYTMQVGSFILHPKNITIVTGAPRHRHMGAVFLLSQEAGGDLRRRQVLEGSQVGAYFGSAIALADLNNDGWQDLLVGAPYYFERKEEVGGAIYVFMNQAGTSFPAHPSLLLHGPSGSAFGLSVASIGDINQDGFQDIAVGAPFEGLGKVYIYHSSSKGLLRQPQQVIHGEKLGLPGLATFGYSLSGQMDVDENFYPDLLVGSLSDHIVLLRARPVINIVHKTLVPRPAVLDPALCTATSCVQVELCFAYNQSAGNPNYRRNITLAYTLEADRDRRPPRLRFAGSESAVFHGFFSMPEMRCQKLELLLMDNLRDKLRPIIISMNYSLPLRMPDRPRLGLRSLDAYPILNQAQALENHTEVQFQKECGPDNKCESNLQMRAAFVSEQQQKLSRLQYSRDVRKLLLSINVTNTRTSERSGEDAHEALLTLVVPPALLLSSVRPPGACQANETIFCELGNPFKRNQRMELLIAFEVIGVTLHTRDLQVQLQLSTSSHQDNLWPMILTLLVDYTLQTSLSMVNHRLQSFFGGTVMGESGMKTVEDVGSPLKYEFQVGPMGEGLVGLGTLVLGLEWPYEVSNGKWLLYPTEITVHGNGSWPCRPPGDLINPLNLTLSDPGDRPSSPQRRRRQLDPGGGQGPPPVTLAAAKKAKSETVLTCATGRAHCVWLECPIPDAPVVTNVTVKARVWNSTFIEDYRDFDRVRVNGWATLFLRTSIPTINMENKTTWFSVDIDSELVEELPAEIELWLVLVAVGAGLLLLGLIILLLWKCGFFKRARTRALYEAKRQKAEMKSQPSETERLTDDY

SEQ ID NO: 483 - protein, 1066 aa, Homo sapiens
MGPGPSRAPRAPRLMLCALALMVAAGGCVVSAFNLDTRFLVVKEAGNPGSLFGYSVALHRQTERQQRYLLLAGAPRELAVPDGYTNRTGAVYLCPLTAHKDDCERMNITVKNDPGHHIIEDMWLGVTVASQGPAGRVLVCAHRYTQVLWSGSEDQRRMVGKCYVRGNDLELDSSDDWQTYHNEMCNSNTDYLETGMCQLGTSGGFTQNTVYFGAPGAYNWKGNSYMIQRKEWDLSEYSYKDPEDQGNLYIGYTMQVGSFILHPKNITIVTGAPRHRHMGAVFLLSQEAGGDLRRRQVLEGSQVGAYFGSAIALADLNNDGWQDLLVGAPYYFERKEEVGGAIYVFMNQAGTSFPAHPSLLLHGPSGSAFGLSVASIGDINQDGFQDIAVGAPFEGLGKVYIYHSSSKGLLRQPQQVIHGEKLGLPGLATFGYSLSGQMDVDENFYPDLLVGSLSDHIVLLRARPVINIVHKTLVPRPAVLDPALCTATSCVQVELCFAYNQSAGNPNYRRNITLAYTLEADRDRRPPRLRFAGSESAVFHGFFSMPEMRCQKLELLLMDNLRDKLRPIIISMNYSLPLRMPDRPRLGLRSLDAYPILNQAQALENHTEVQFQKECGPDNKCESNLQMRAAFVSEQQQKLSRLQYSRDVRKLLLSINVTNTRTSERSGEDAHEALLTLVVPPALLLSSVRPPGACQANETIFCELGNPFKRNQRMELLIAFEVIGVTLHTRDLQVQLQLSTSSHQDNLWPMILTLLVDYTLQTSLSMVNHRLQSFFGGTVMGESGMKTVEDVGSPLKYEFQVGPMGEGLVGLGTLVLGLEWPYEVSNGKWLLYPTEITVHGNGSWPCRPPGDLINPLNLTLSDPGDRPSSPQRRRRQLDPGGGQGPPPVTLAAAKKAKSETVLTCATGRAHCVWLECPIPDAPVVTNVTVKARVWNSTFIEDYRDFDRVRVNGWATLFLRTSIPTINMENKTTWFSVDIDSELVEELPAEIELWLVLVAVGAGLLLLGLIILLLWKCDFFKRTRYYQIMPKYHAVRIREEERYPPPGSTLPTKKHWVTSWQTRDQYY

SEQ ID NO: 484 - protein, 1066 aa, Homo sapiens; identical to SEQ ID NO: 483

SEQ ID NO: 485 - protein, 1051 aa, Homo sapiens; identical to SEQ ID NO: 482

SEQ ID NO: 486 - protein, 914 aa, Homo sapiens [sequence omitted]

SEQ ID NO: 487 - protein, 1030 aa, Homo sapiens
MKMADAKQKRNEQLKRWIGSETDLEPPVVKRQKTKVKFDDGAVFLAACSSGDTDEVLKLLHRGADINYANVDGLTALHQACIDDNVDMVKFLVENGANINQPDNEGWIPLHAAASCGYLDIAEFLIGQGAHVGAVNSEGDTPLDIAEEEAMEELLQNEVNRQGVDIEAARKEEERIMLRDARQWLNSGHINDVRHAKSGGTALHVAAAKGYTEVLKLLIQAGYDVNIKDYDGWTPLHAAAHWGKEEACRILVDNLCDMEMVNKVGQTAFDVADEDILGYLEELQKKQNLLHSEKRDKKSPLIESTANMDNNQSQKTFKNKETLIIEPEKNASRIESLEQEKVDEEEEGKKDESSCSSEEDEEDDSESEAETDKTKPLASVTNANTSSTQAAPVAVTTPTVSSGQATPTSPIKKFPTTATKISPKEEERKDESPATWRLGLRKTGSYGALAEITASKEGQKEKDTAGVTRSASSPRLSSSLDNKEKEKDSKGTRLAYVAPTIPRRLASTSDIEEKENRDSSSLRTSSSYTRRKWEDDLKKNSSVNEGSTYHKSCSFGRRQDDLISSSVPSTTSTPTVTSAAGLQKSLLSSTSTTTKITTGSSSAGTQSSTSNRLWAEDSTEKEKDSVPTAVTIPVAPTVVNAAASTTTLTTTTAGTVSSTTEVRERRRSYLTPVRDEESESQRKARSRQARQSRRSTQGVTLTDLQEAEKTIGRSRSTRTREQENEEKEKEEKEKQDKEKQEEKKESETSREDEYKQKYSRTYDETYQRYRPVSTSSSTTPSSSLSTMSSSLYASSQLNRPNSLVGITSAYSRGITKENEREGEKREEEKEGEDKSQPKSIRERRRPREKRRSTGVSFWTQDSDENEQEQQSDTEEGSNKKETQTDSISRYETSSTSAGDRYDSLLGRSGSYSYLEERKPYSSRLEKDDSTDFKKLYEQILAENEKLKAQLHDTNMELTDLKLQLEKATQRQERFADRSLLEMEKRERRALERRISEMEEELKMLPDLKADNQRLKDENGALIRVISKLSK

SEQ ID NO: 488 - protein, 914 aa, Homo sapiens [sequence omitted]

SEQ ID NO: 489 - protein, 364 aa, Homo sapiens
MAAISTSIPVISQPQFTAMNEPQCFYNESIAFFYNRSGKHLATEWNTVSKLVMGLGITVCIFIMLANLLVMVAIYVNRRFHFPIYYLMANLAAADFFAGLAYFYLMFNTGPNTRRLTVSTWLLRQGLIDTSLTASVANLLAIAIERHITVFRMQLHTRMSNRRVVVVIVVIWTMAIVMGAIPSVGWNCICDIENCSNMAPLYSDSYLVFWAIFNLVTFVVMVVLYAHIFGYVRQRTMRMSRHSSGPRRNRDTMMSLLKTVVIVLGAFIICWTPGLVLLLLDVCCPQCDVLAYEKFFLLLAEFNSAMNPIIYSYRDKEMSATFRQILCCQRSENPTGPTEGSDRSASSLNHTILAGVHSNDHSVV

SEQ ID NO: 490 - protein, 364 aa, Homo sapiens; identical to SEQ ID NO: 489

SEQ ID NO: 491 - protein, 364 aa, Homo sapiens; identical to SEQ ID NO: 489

SEQ ID NO: 492 - protein, 364 aa, Homo sapiens; identical to SEQ ID NO: 489

SEQ ID NO: 493 - protein, 364 aa, Homo sapiens; identical to SEQ ID NO: 489

SEQ ID NO: 494 - protein, 142 aa, Homo sapiens
MGAPTLPPAWQPFLKDHRISTFKNWPFLEGCACTPERMAEAGFIHCPTENEPDLAQCFFCFKELEGWEPDDDPIEEHKKHSSGCAFLSVKKQFEELTLGEFLKLDRERAKNKIAKETNNKKKEFEETAKKVRRAIEQLAAMD

SEQ ID NO: 495 - protein, 165 aa, Homo sapiens
MGAPTLPPAWQPFLKDHRISTFKNWPFLEGCACTPERMAEAGFIHCPTENEPDLAQCFFCFKELEGWEPDDDPIGPGTVAYACNTSTLGGRGGRITREEHKKHSSGCAFLSVKKQFEELTLGEFLKLDRERAKNKIAKETNNKKKEFEETAKKVRRAIEQLAAMD

SEQ ID NO: 496 - protein, 137 aa, Homo sapiens
MGAPTLPPAWQPFLKDHRISTFKNWPFLEGCACTPERMAEAGFIHCPTENEPDLAQCFFCFKELEGWEPDDDPMQRKPTIRRKNLRKLRRKCAVPSSSWLPWIEASGRSCLVPEWLHHFQGLFPGATSLPVGPLAMS

SEQ ID NO: 497 - protein, 120 aa, Homo sapiens
MGAPTLPPAWQPFLKDHRISTFKNWPFLEGCACTPERMAEAGFIHCPTENEPDLAQCFFCFKELEGWEPDDDPIEEHKKHSSGCAFLSVKKQFEELTLGEFLKLDRERAKNKIERALLAE

SEQ ID NO: 498 - protein, 137 aa, Homo sapiens; identical to SEQ ID NO: 496

SEQ ID NO: 499 - protein, 165 aa, Homo sapiens; identical to SEQ ID NO: 495

SEQ ID NO: 500 - protein, 142 aa, Homo sapiens; identical to SEQ ID NO: 494

SEQ ID NO: 501 - protein, 481 aa, Homo sapiens
MGNVNRQGQHCRDFIMVSQALRLLCLLLGLQGCLAAGGVAKASGGETRDMPWKPGPHRVFVTQEEAHGVLHRRRRANAFLEELRPGSLERECKEEQCSFEEAREIFKDAERTKLFWISYSDGDQCASSPCQNGGSCKDQLQSYICFCLPAFEGRNCETHKDDQLICVNENGGCEQYCSDHTGTKRSCRCHEGYSLLADGVSCTPTVEYPCGKIPILEKRNASKPQGRIVGGKVCPKGECPWQVLLLVNGAQLCGGTLINTIWVVSAAHCFDKIKNWRNLIAVLGEHDLSEHDGDEQSRRVAQVIIPSTYVPGTTNHDIALLRLHQPVVLTDHVVPLCLPERTFSERTLAFVRFSLVSGWGQLLDRGATALELMVLNVPRLMTQDCLQQSRKVGDSPNITEYMFCAGYSDGSKDSCKGDSGGPHATHYRGTWYLTGIVSWGQGCATVGHFGVYTRVSQYIEWLQKLMRSEPRPGVLLRAPFP

SEQ ID NO: 502 - protein, 481 aa, Homo sapiens; identical to SEQ ID NO: 501

SEQ ID NO: 503 - protein, 459 aa, Homo sapiens
MGNVNRQGQHCRDFIMVSQALRLLCLLLGLQGCLAAVFVTQEEAHGVLHRRRRANAFLEELRPGSLERECKEEQCSFEEAREIFKDAERTKLFWISYSDGDQCASSPCQNGGSCKDQLQSYICFCLPAFEGRNCETHKDDQLICVNENGGCEQYCSDHTGTKRSCRCHEGYSLLADGVSCTPTVEYPCGKIPILEKRNASKPQGRIVGGKVCPKGECPWQVLLLVNGAQLCGGTLINTIWVVSAAHCFDKIKNWRNLIAVLGEHDLSEHDGDEQSRRVAQVIIPSTYVPGTTNHDIALLRLHQPVVLTDHVVPLCLPERTFSERTLAFVRFSLVSGWGQLLDRGATALELMVLNVPRLMTQDCLQQSRKVGDSPNITEYMFCAGYSDGSKDSCKGDSGGPHATHYRGTWYLTGIVSWGQGCATVGHFGVYTRVSQYIEWLQKLMRSEPRPGVLLRAPFP

SEQ ID NO: 504 - protein, 459 aa, Homo sapiens; identical to SEQ ID NO: 503

SEQ ID NO: 505 - protein, 405 aa, Homo sapiens
MGSRIKQNPETTFEVYVEVAYPRTGGTLSDPEVQRQFPEDYSDQEVLQTLTKFCFPFYVDSLTVSQVGQNFTFVLTDIDSKQRFGFCRLSSGAKSCFCILSYLPWFEVFYKLLNILADYTTKRQENQWNELLETLHKLPIPDPGVSVHLSVHSYFTVPDTRELPSIPENRNLTEYFVAVDVNNMLHLYASMLYERRILIICSKLSTLTACIHGSAAMLYPMYWQHVYIPVLPPHLLDYCCAPMPYLIGIHLSLMEKVRNMALDDVVILNVDTNTLETPFDDLQSLPNDVISSLKNRLKKVSTTTGDGVARAFLKAQAAFFGSYRNALKIEPEEPITFCEEAFVSHYRSGAMRQFLQNATQLQLFKQFIDGRLDLLNSGEGFSDVFEEEINMGEYAGFLLRLNQST

SEQ ID NO: 506 - protein, 376 aa, Homo sapiens
MLHLYASMLYERRILIICSKLSTLTACIHGSAAMLYPMYWQHVYIPVLPPHLLDYCCAPMPYLIGIHLSLMEKVRNMALDDVVILNVDTNTLETPFDDLQSLPNDVISSLKNRLKKVSTTTGDGVARAFLKAQAAFFGSYRNALKIEPEEPITFCEEAFVSHYRSGAMRQFLQNATQLQLFKQFIDGRLDLLNSGEGFSDVFEEEINMGEYAGSDKLYHQWLSTVRKGSGAILNTVKTKANPAMKTVYKFAKDHAKMGIKEVKNRLKQKDIAENGCAPTPEEQLPKTAPSPLVEAKDPKLREDRRPITVHFGQVRPPRPHVVKRPKSNIAVEGRRTSVPSPEQNTIATPATLHILQKSITHFAAKFPTRGWTSSSH

SEQ ID NO: 507 - protein, 1009 aa, Homo sapiens
MGSRIKQNPETTFEVYVEVAYPRTGGTLSDPEVQRQFPEDYSDQEVLQTLTKFCFPFYVDSLTVSQVGQNFTFVLTDIDSKQRFGFCRLSSGAKSCFCILSYLPWFEVFYKLLNILADYTTKRQENQWNELLETLHKLPIPDPGVSVHLSVHSYFTVPDTRELPSIPENRNLTEYFVAVDVNNMLHLYASMLYERRILIICSKLSTLTACIHGSAAMLYPMYWQHVYIPVLPPHLLDYCCAPMPYLIGIHLSLMEKVRNMALDDVVILNVDTNTLETPFDDLQSLPNDVISSLKNRLKKVSTTTGDGVARAFLKAQAAFFGSYRNALKIEPEEPITFCEEAFVSHYRSGAMRQFLQNATQLQLFKQFIDGRLDLLNSGEGFSDVFEEEINMGEYAGSDKLYHQWLSTVRKGSGAILNTVKTKANPAMKTVYKFAKDHAKMGIKEVKNRLKQKDIAENGCAPTPEEQLPKTAPSPLVEAKDPKLREDRRPITVHFGQVRPPRPHVVKRPKSNIAVEGRRTSVPSPEQPQPYRTLRESDSAEGDEAESPEQQVRKSTGPVPAPPDRAASIDLLEDVFSNLDMEAALQPLGQAKSLEDLRAPKDLREQPGTFDYQRLDLGGSERSRGVTVALKLTHPYNKLWSLGQDDMAIPSKPPAASPEKPSALLGNSLALPRRPQNRDSILNPSDKEEVPTPTLGSITIPRPQGRKTPELGIVPPPPIPRPAKLQAAGAALGDVSERLQTDRDRRAALSPGLLPGVVPQGPTELLQPLSPGPGAAGTSSDALLALLDPLSTAWSGSTLPSRPATPNVATPFTPQFSFPPAGTPTPFPQPPLNPFVPSMPAAPPTLPLVSTPAGPFGAPPASLGPAFASGLLLSSAGFCAPHRSQPNLSALSMPNLFGQMPMGTHTSPLQPLGPPAVAPSRIRTLPLARSSARAAETKQGLALRPGDPPLLPPRPPQGLEPTLQPSAPQQARDPFEDLLQKTKQDVSPSPALAPAPDSVEQLRKQWETFE

SEQ ID NO: 508 - protein, 529 aa, Homo sapiens
MLKWPIPGQVALFQEVLQTLTKFCFPFYVDSLTVSQVGQNFTFVLTDIDSKQRFGFCRLSSGAKSCFCILSYLPWFEVFYKLLNILADYTTKRQENQWNELLETLHKLPIPDPGVSVHLSVHSYFTVPDTRELPSIPENRNLTEYFVAVDVNNMLHLYASMLYERRILIICSKLSTLTACIHGSAAMLYPMYWQHVYIPVLPPHLLDYCCAPMPYLIGIHLSLMEKVRNMALDDVVILNVDTNTLETPFDDLQSLPNDVISSLKNRLKKVSTTTGDGVARAFLKAQAAFFGSYRNALKIEPEEPITFCEEAFVSHYRSGAMRQFLQNATQLQLFKQFIDGRLDLLNSGEGFSDVFEEEINMGEYAGSDKLYHQWLSTVRKGSGAILNTVKTKANPAMKTVYKFAKDHAKMGIKEVKNRLKQKDIAENGCAPTPEEQLPKTAPSPLVEAKDPKLREDRRPITVHFGQVRPPRPHVVKRPKSNIAVEGRRTSVPSPEQNTIATPATLHILQKSITHFAAKFPTRGWTSSSH

SEQ ID NO: 509 - protein, 348 aa, Homo sapiens
MNDPNSCVDNATVCSGASCVVPESNFNNILSVVLSTVLTILLALVMFSMGCNVEIKKFLGHIKRPWGICVGFLCQFGIMPLTGFILSVAFDILPLQAVVVLIIGCCPGGTASNILAYWVDGDMDLSVSMTTCSTLLALGMMPLCLLIYTKMWVDSGSIVIPYDNIGTSLVALVVPVSIGMFVNHKWPQKAKIILKIGSIAGAILIVLIAVVGGILYQSAWIIAPKLWIIGTIFPVAGYSLGFLLARIAGLPWYRCRTVAFETGMQNTQLCSTIVQLSFTPEELNVVFTFPLIYSIFQLAFAAIFLGFYVAYKKCHGKNKAEIPESKENGTEPESSFYKANGGFQPDEK

SEQ ID NO: 510 - protein, 306 aa, Homo sapiens
MREGLGAACEAAGPRLCRLLCRILRPKPDCCPRRASPVTQDDLQYHNLSKQQNESPQPLVETGKKSPESLVKLDATPLSSPRHVRIKNWGSGMTFQDTLHHKAKGILTCRSKSCLGSIMTPKSLTRGPRDKPTPPDELLPQAIEFVNQYYGSFKEAHRHHSISNALENDYMKMAITSKTLKELDVNVKNNPFLHMHVLTTMCVGGVGVMVIITVVMLRAKIEEHLARVEAVTKEIETTGTYQLTGDELIFATKQAWRNAPRCIGRIQWSNLQVNFLRLERERAGGGQALSRWLGTATQSCAQASWD

SEQ ID NO: 511 - protein, 974 aa, Homo sapiens [sequence omitted]

SEQ ID NO: 512 - protein, 997 aa, Homo sapiens [sequence omitted]

SEQ ID NO: 513 - protein, 1153 aa, Homo sapiens
MACPWKFLFKTKFHQYAMNGEKDINNNVEKAPCATSSPVTQDDLQYHNLSKQQNESPQPLVETGKKSPESLVKLDATPLSSPRHVRIKNWGSGMTFQDTLHHKAKGILTCRSKSCLGSIMTPKSLTRGPRDKPTPPDELLPQAIEFVNQYYGSFKEAKIEEHLARVEAVTKEIETTGTYQLTGDELIFATKQAWRNAPRCIGRIQWSNLQVFDARSCSTAREMFEHICRHVRYSTNNGNIRSAITVFPQRSDGKHDFRVWNAQLIRYAGYQMPDGSIRGDPANVEFTQLCIDLGWKPKYGRFDVVPLVLQANGRDPELFEIPPDLVLEVAMEHPKYEWFRELELKWYALPAVANMLLEVGGLEFPGCPFNGWYMGTEIGVRDFCDVQRYNILEEVGRRMGLETHKLASLWKDQAVVEINIAVLHSFQKQNVTIMDHHSAAESFMKYMQNEYRSRGGCPADWIWLVPPMSGSITPVFHQEMLNYVLSPFYYYQVEAWKTHVWQDEKRRPKRREIPLKVLVKAVLFACMLMRKTMASRVRVTILFATETGKSEALAWDLGALFSCAFNPKVVCMDKYRLSCLEEERLLLVVTSTFGNGDCPGNGEKLKKSLFMLKELNNKFRYAVFGLGSSMYPRFCAFAHDIDQKLSHLGASQLTPMGEGDELSGQEDAFRSWAVQTFKAACETFDVRGKQHIQIPKLYTSNVTWDPHHYRLVQDSQPLDLSKALSSMHAKNVFTMRLKSRQNLQSPTSSRATILVELSCEDGQGLNYLPGEHLGVCPGNQPALVQGILERVVDGPTPHQTVRLEALDESGSYWVSDKRLPPCSLSQALTYFLDITTPPTQLLLQKLAQVATEEPERQRLEALCQPSEYSKWKFTNSPTFLEVLEEFPSLRVSAGFLLSQLPILKPRFYSISSSRDHTPTEIHLTVAVVTYHTRDGQGPLHHGVCSTWLNSLKPQDPVPCFVRNASGFHLPEDPSHPCILIGPGTGIAPFRSFWQQRLHDSQHKGVRGGRMTLVFGCRRPDEDHIYQEEMLEMAQKGVLHAVHTAYSRLPGKPKVYVQDILRQQLASEVLRVLHKEPGHLYVCGDVRMARDVAHTLKQLVAAKLKLNEEQVEDYFFQLKSQKRYHEDIFGAVFPYEAKKDRVAVQPSSLEMSAL

SEQ ID NO: 514 - protein, 599 aa, Homo sapiens [sequence omitted]

SEQ ID NO: 515 - protein, 562 aa, Homo sapiens [sequence omitted]

SEQ ID NO: 516 - protein, 663 aa, Homo sapiens
MGRYRIRVATGAWLFSGSYNRVQLWLVGTRGEAELELQLRPARGEEEEFDHDVAEDLGLLQFVRLRKHHWLVDDAWFCDRITVQGPGACAEVAFPCYRWVQGEDILSLPEGTARLPGDNALDMFQKHREKELKDRQQIYCWATWKEGLPLTIAADRKDDLPPNMRFHEEKRLDFEWTLKAGALEMALKRVYTLLSSWNCLEDFDQIFWGQKSALAEKVRQCWQDDELFSYQFLNGANPMLLRRSTSLPSRLVLPSGMEELQAQLEKELQNGSLFEADFILLDGIPANVIRGEKQYLAAPLVMLKMEPNGKLQPMVIQIQPPNPSSPTPTLFLPSDPPLAWLLAKSWVRNSDFQLHEIQYHLLNTHLVAEVIAVATMRCLPGLHPIFKFLIPHIRYTMEINTRARTQLISDGGIFDKAVSTGGGGHVQLLRRAAAQLTYCSLCPPDDLADRGLLGLPGALYAHDALRLWEIIARYVEGIVHLFYQRDDIVKGDPELQAWCREITEVGLCQAQDRGFPVSFQSQSQLCHFLTMCVFTCTAQHAAINQGQLDWYAWVPNAPCTMRMPPPTTKEDVTMATVMGSLPDVRQACLQMAISWHLSRRQPDMVPLGHHKEKYFSGPKPKAVLNQFRTDLEKLEKEITARNEQLDWPYEYLKPSCIENSVTI

SEQ ID NO: 517 - protein, 663 aa, Homo sapiens; identical to SEQ ID NO: 516

SEQ ID NO: 518 - protein, 375 aa, Homo sapiens
MDALQLANSAFAVDLFKQLCEKEPLGNVLFSPICLSTSLSLAQVGAKGDTANEIGQVLHFENVKDVPFGFQTVTSDVNKLSSFYSLKLIKRLYVDKSLNLSTEFISSTKRPYAKELETVDFKDKLEETKGQINNSIKDLTDGHFENILADNSVNDQTKILVVNAAYFVGKWMKKFSESETKECPFRVNKTDTKPVQMMNMEATFCMGNIDSINCKIIELPFQNKHLSMFILLPKDVEDESTGLEKIEKQLNSESLSQWTNPSTMANAKVKLSIPKFKVEKMIDPKACLENLGLKHIFSEDTSDFSGMSETKGVALSNVIHKVCLEITEDGGDSIEVPGARILQHKDELNADHPFIYIIRHNKTRNIIFFGKFCSP

SEQ ID NO: 519 - protein, 265 aa, Homo sapiens
MQRNWKLLTSKINWKKRKVRSTTQLRISQMASHFENILADNSVNDQTKILVVNAAYFVGKWMKKFSESETKECPFRVNKTDTKPVQMMNMEATFCMGNIDSINCKIIELPFQNKHLSMFILLPKDVEDESTGLEKIEKQLNSESLSQWTNPSTMANAKVKLSIPKFKVEKMIDPKACLENLGLKHIFSEDTSDFSGMSETKGVALSNVIHKVCLEITEDGGDSIEVPGARILQHKDELNADHPFIYIIRHNKTRNIIFFGKFCSP

SEQ ID NO: 520 - protein, 375 aa, Homo sapiens; identical to SEQ ID NO: 518

SEQ ID NO: 521 - protein, 145 aa, Homo sapiens [sequence omitted]

SEQ ID NO: 522 - protein, 127 aa, Homo sapiens
MSFSGKYQLQSQENFEAFMKAIGLPEELIQKGKDIKGVSEIVQNGKHFKFTITAGSKVIQNEFTVGEECELETMTGEKVKTVVQLEGDNKLVTTFKNIKSVTELNGDIITNTMTLGDIVFKRISKRI

SEQ ID NO: 523 - protein, 115 aa, Homo sapiens
MSFSGKYQLQSQENFEAFMKAIGLPEELIQKGKDIKGVSEIVQNGKHFKFTITAGSKVIQNEFTVGEECELETMTGEKVKVGGHPFCCQNFPWNLALGPHSSRLKPHNSTHRYHL

SEQ ID NO: 524 - protein, 1268 aa, Homo sapiens
MSSVAVLTQESFAEHRSGLVPQQIKVATLNSEEESDPPTYKDAFPPLPEKAACLESAQEPAGAWGNKIRPIKASVITQVFHVPLEERKYKDMNQFGEGEQAKICLEIMQRTGAHLELSLAKDQGLSIMVSGKLDAVMKARKDIVARLQTQASATVAIPKEHHRFVIGKNGEKLQDLELKTATKIQIPRPDDPSNQIKITGTKEGIEKARHEVLLISAEQDKRAVERLEVEKAFHPFIAGPYNRLVGEIMQETGTRINIPPPSVNRTEIVFTGEKEQLAQAVARIKKIYEEKKKKTTTIAVEVKKSQHKYVIGPKGNSLQEILERTGVSVEIPPSDSISETVILRGEPEKLGQALTEVYAKANSFTVSSVAAPSWLHRFIIGKKGQNLAKITQQMPKVHIEFTEGEDKITLEGPTEDVNVAQEQIEGMVKDLINRMDYVEINIDHKFHRHLIGKSGANINRIKDQYKVSVRIPPDSEKSNLIRIEGDPQGVQQAKRELLELASRMENERTKDLIIEQRFHRTIIGQKGERIREIRDKFPEVIINFPDPAQKSDIVQLRGPKNEVEKCTKYMQKMVADLVENSYSISVPIFKQFHKNIIGKGGANIKKIREESNTKIDLPAENSNSETIIITGKRANCEAARSRILSIQKDLANIAEVEVSIPAKLHNSLIGTKGRLIRSIMEECGGVHIHFPVEGSGSDTVVIRGPSSDVEKAKKQLLHLAEEKQTKSFTVDIRAKPEYHKFLIGKGGGKIRKVRDSTGARVIFPAAEDKDQDLITIIGKEDAVREAQKELEALIQNLDNVVEDSMLVDPKHHRHFVIRRGQVLREIAEEYGGVMVSFPRSGTQSDKVTLKGAKDCVEAAKKRIQEIIEDLEAQVTLECAIPQKFHRSVMGPKGSRIQQITRDFSVQIKFPDREENAVHSTEPVVQENGDEAGEGREAKDCDPGSPRRCDIIIISGRKEKCEAAKEALEALVPVTIEVEVPFDLHRYVIGQKGSGIRKMMDEFEVNIHVPAPELQSDIIAITGLAANLDRAKAGLLERVKELQAEQEDRALRSFKLSVTVDPKYHPKIIGRKGAVITQIRLEHDVNIQFPDKDDGNQPQDQITITGYEKNTEAARDAILRIVGELEQMVSEDVPLDHRVHARIIGARGKAIRKIMDEFKVDIRFPQSGAPDPNCVTVTGLPENVEEAIDHILNLEEEYLADVVDSEALQVYMKPPAHEEAKAPSRGFVVRDAPWTASSSEKAPDMSSSEEFPSFGAQVAPKTLPWGPKR

SEQ ID NO: 525 - protein, 1268 aa, Homo sapiens; identical to SEQ ID NO: 524

SEQ ID NO: 526 - protein, 1268 aa, Homo sapiens; identical to SEQ ID NO: 524

SEQ ID NO: 527 - protein, 397 aa, Homo sapiens
MNAGSDPVVIVSAARTIIGSFNGALAAVPVQDLGSTVIKEVLKRATVAPEDVSEVIFGHVLAAGCGQNPVRQASVGAGIPYSVPAWSCQMICGSGLKAVCLAVQSIGIGDSSIVVAGGMENMSKAPHLAYLRTGVKIGEMPLTDSILCDGLTDAFHNCHMGITAENVAKKWQVSREDQDKVAVLSQNRTENAQKAGHFDKEIVPVLVSTRKGLIEVKTDEFPRHGSNIEAMSKLKPYFLTDGTGTVTPANASGINDGAAAVVLMKKSEADKRGLTPLARIVSWSQVGVEPSIMGIGPIPAIKQAVTKAGWSLEDVDIFEINEAFAAVSAAIVKELGLNPEKVNIEGGAIALGHPLGASGCRILVTLLHTLERMGRSRGVAALCIGGGMGIAMCVQRE

SEQ ID NO: 528 - protein, 397 aa, Homo sapiens; identical to SEQ ID NO: 527

SEQ ID NO: 529 - protein, 397 aa, Homo sapiens; identical to SEQ ID NO: 527

SEQ ID NO: 530 - protein, 1278 aa, Homo sapiens
MTARGLALGLLLLLLCPAQVFSQSCVWYGECGIAYGDKRYNCEYSGPPKPLPKDGYDLVQELCPGFFFGNVSLCCDVRQLQTLKDNLQLPLQFLSRCPSCFYNLLNLFCELTCSPRQSQFLNVTATEDYVDPVTNQTKTNVKELQYYVGQSFANAMYNACRDVEAPSSNDKALGLLCGKDADACNATNWIEYMFNKDNGQAPFTITPVFSDFPVHGMEPMNNATKGCDESVDEVTAPCSCQDCSIVCGPKPQPPPPPAPWTILGLDAMYVIMWITYMAFLLVFFGAFFAVWCYRKRYFVSEYTPIDSNIAFSVNASDKGEASCCDPVSAAFEGCLRRLFTRWGSFCVRNPGCVIFFSLVFITACSSGLVFVRVTTNPVDLWSAPSSQARLEKEYFDQHFGPFFRTEQLIIRAPLTDKHIYQPYPSGADVPFGPPLDIQILHQVLDLQIAIENITASYDNETVTLQDICLAPLSPYNTNCTILSVLNYFQNSHSVLDHKKGDDFFVYADYHTHFLYCVRAPASLNDTSLLHDPCLGTFGGPVFPWLVLGGYDDQNYNNATALVITFPVNNYYNDTEKLQRAQAWEKEFINFVKNYKNPNLTISFTAERSIEDELNRESDSDVFTVVISYAIMFLYISLALGHIKSCRRLLVDSKVSLGIAGILIVLSSVACSLGVFSYIGLPLTLIVIEVIPFLVLAVGVDNIFILVQAYQRDERLQGETLDQQLGRVLGEVAPSMFLSSFSETVAFFLGALSVMPAVHTFSLFAGLAVFIDFLLQITCFVSLLGLDIKRQEKNRLDIFCCVRGAEDGTSVQASESCLFRFFKNSYSPLLLKDWMRPIVIAIFVGVLSFSIAVLNKVDIGLDQSLSMPDDSYMVDYFKSISQYLHAGPPVYFVLEEGHDYTSSKGQNMVCGGMGCNNDSLVQQIFNAAQLDNYTRIGFAPSSWIDDYFDWVKPQSSCCRVDNITDQFCNASVVDPACVRCRPLTPEGKQRPQGGDFMRFLPMFLSDNPNPKCGKGGHAAYSSAVNILLGHGTRVGATYFMTYHTVLQTSADFIDALKKARLIASNVTETMGINGSAYRVFPYSVFYVFYEQYLTIIDDTIFNLGVSLGAIFLVTMVLLGCELWSAVIMCATIAMVLVNMFGVMWLWGISLNAVSLVNLVMSCGISVEFCSHITRAFTVSMKGSRVERAEEALAHMGSSVFSGITLTKFGGIVVLAFAKSQIFQIFYFRMYLAMVLLGATHGLIFLPVLLSYIGPSVNKAKSCATEERYKGTERERLLNF

SEQ ID NO: 531 - protein, 1167 aa, Homo sapiens
MELPFVTHLFLPLVFLTGLCSPFNLDEHHPRLFPGPPEAEFGYSVLQHVGGGQRWMLVGAPWDGPSGDRRGDVYRCPVGGAHNAPCAKGHLGDYQLGNSSHPAVNMHLGMSLLETDGDGGFMACAPLWSRACGSSVFSSGICARVDASFQPQGSLAPTAQRCPTYMDVVIVLDGSNSIYPWSEVQTFLRRLVGKLFIDPEQIQVGLVQYGESPVHEWSLGDFRTKEEVVRAAKNLSRREGRETKTAQAIMVACTEGFSQSHGGRPEAARLLVVVTDGESHDGEELPAALKACEAGRVTRYGIAVLGHYLRRQRDPSSFLREIRTIASDPDERFFFNVTDEAALTDIVDALGDRIFGLEGSHAENESSFGLEMSQIGFSTHRLKDGILFGMVGAYDWGGSVLWLEGGHRLFPPRMALEDEFPPALQNHAAYLGYSVSSMLLRGGRRLFLSGAPRFRHRGKVIAFQLKKDGAVRVAQSLQGEQIGSYFGSELCPLDTDRDGTTDVLLVAAPMFLGPQNKETGRVYVYLVGQQSLLTLQGTLQPEPPQDARFGFAMGALPDLNQDGFADVAVGAPLEDGHQGALYLYHGTQSGVRPHPAQRIAAASMPHALSYFGRSVDGRLDLDGDDLVDVAVGAQGAAILLSSRPIVHLTPSLEVTPQAISVVQRDCRRRGQEAVCLTAALCFQVTSRTPGRWDHQFYMRFTASLDEWTAGARAAFDGSGQRLSPRRLRLSVGNVTCEQLHFHVLDTSDYLRPVALTVTFALDNTTKPGPVLNEGSPTSIQKLVPFSKDCGPDNECVTDLVLQVNMDIRGSRKAPFVVRGGRRKVLVSTTLENRKENAYNTSLSLIFSRNLHLASLTPQRESPIKVECAAPSAHARLCSVGHPVFQTGAKVTFLLEFEFSCSSLLSQVFVKLTASSDSLERNGTLQDNTAQTSAYIQYEPHLLFSSESTLHRYEVHPYGTLPVGPGPEFKTTLRVQNLGCYVVSGLIISALLPAVAHGGNYFLSLSQVITNNASCIVQNLTEPPGPPVHPEELQHTNRLNGSNTQCQVVRCHLGQLAKGTEVSVGLLRLVHNEFFRRAKFKSLTVVSTFELGTEEGSVLQLTEASRWSESLLEVVQTRPILISLWILIGSVLGGLLLLALLVFCLWKLGFFAHKKIPEEEKREEKLEQ

SEQ ID NO: 532 - protein, 1177 aa, Homo sapiens [sequence omitted]

SEQ ID NO: 533 - protein, 160 aa, Homo sapiens
MDYLLMIFSLLFVACQGAPETAVLGAELSAVGENGGEKPTPSPPWRLRRSKRCSCSSLMDKECVYFCHLDIIWVNTPEAEDIMEKDWNNHKKGKDCSKLGKKCIYQQLVRGRKIRRSSEEHLRQTRSETMRNSVKSSFHDPKLKGKPSRERYVTHNRAHW

SEQ ID NO: 534 - protein, 212 aa, Homo sapiens
MDYLLMIFSLLFVACQGAPETAVLGAELSAVGENGGEKPTPSPPWRLRRSKRCSCSSLMDKECVYFCHLDIIWVNTPEHVVPYGLGSPRSKRALENLLPTKATDRENRCQCASQKDKKCWNFCQAGKELRAEDIMEKDWNNHKKGKDCSKLGKKCIYQQLVRGRKIRRSSEEHLRQTRSETMRNSVKSSFHDPKLKGKPSRERYVTHNRAHW

SEQ ID NO: 535 - protein, 212 aa, Homo sapiens; identical to SEQ ID NO: 534

SEQ ID NO: 536 - protein, 78 aa, Homo sapiens
MEKDWNNHKKGKDCSKLGKKCIYQQLVRGRKIRRSSEEHLRQTRSETMRNSVKSSFHDPKLKGKPSRERYVTHNRAHW

SEQ ID NO: 537 - protein, 894 aa, Homo sapiens [sequence omitted]

SEQ ID NO: 538 - protein, 790 aa, Homo sapiens
MANCQIAILYQRFQRVVFGISQLLCFSALISELTNQKEVAAWTYHYSTKAYSWNISRKYCQNRYTDLVAIQNKNEIDYLNKVLPYYSSYYWIGIRKNNKTWTWVGTKKALTNEAENWADNEPNNKRNNEDCVEIYIKSPSAPGKWNDEHCLKKKHALCYTASCQDMSCSKQGECLETIGNYTCSCYPGFYGPECEYVRECGELELPQHVLMNCSHPLGNFSFNSQCSFHCTDGYQVNGPSKLECLASGIWTNKPPQCLAAQCPPLKIPERGNMTCLHSAKAFQHQSSCSFSCEEGFALVGPEVVQCTASGVWTAPAPVCKAVQCQHLEAPSEGTMDCVHPLTAFAYGSSCKFECQPGYRVRGLDMLRCIDSGHWSAPLPTCEAISCEPLESPVHGSMDCSPSLRAFQYDTNCSFRCAEGFMLRGADIVRCDNLGQWTAPAPVCQALQCQDLPVPNEARVNCSHPFGAFRYQSVCSFTCNEGLLLVGASVLQCLATGNWNSVPPECQAIPCTPLLSPQNGTMTCVQPLGSSSYKSTCQFICDEGYSLSGPERLDCTRSGRWTDSPPMCEAIKCPELFAPEQGSLDCSDTRGEFNVGSTCHFSCDNGFKLEGPNNVECTTSGRWSATPPTCKGIASLPTPGVQCPALTTPGQGTMYCRHHPGTFGFNTTCYFGCNAGFTLIGDSTLSCRPSGQWTAVTPACRAVKCSELHVNKPIAMNCSNLWGNFSYGSICSFHCLEGQLLNGSAQTACQENGHWSTTVPTCQDDGKCPLNPHSHLGTYGVFTNAAFDPSP

SEQ ID NO: 539 - protein, 768 aa, Homo sapiens
MANCQIAILYQRFQRVVFGISQLLCFSALISELTNQKEVAAWTYHYSTKAYSWNISRKYCQNRYTDLVAIQNKNEIDYLNKVLPYYSSYYWIGIRKNNKTWTWVGTKKALTNEAENWADNEPNNKRNNEDCVEIYIKSPSAPGKWNDEHCLKKKHALCYTASCQDMSCSKQGECLETIGNYTCSCYPGFYGPECEYVRECGELELPQHVLMNCSHPLGNFSFNSQCSFHCTDGYQVNGPSKLECLASGIWTNKPPQCLAAQCPPLKIPERGNMTCLHSAKAFQHQSSCSFSCEEGFALVGPEVVQCTASGVWTAPAPVCKAISCEPLESPVHGSMDCSPSLRAFQYDTNCSFRCAEGFMLRGADIVRCDNLGQWTAPAPVCQALQCQDLPVPNEARVNCSHPFGAFRYQSVCSFTCNEGLLLVGASVLQCLATGNWNSVPPECQAIPCTPLLSPQNGTMTCVQPLGSSSYKSTCQFICDEGYSLSGPERLDCTRSGRWTDSPPMCEAIKCPELFAPEQGSLDCSDTRGEFNVGSTCHFSCDNGFKLEGPNNVECTTSGRWSATPPTCKGIASLPTPGVQCPALTTPGQGTMYCRHHPGTFGFNTTCYFGCNAGFTLIGDSTLSCRPSGQWTAVTPACRAVKCSELHVNKPIAMNCSNLWGNFSYGSICSFHCLEGQLLNGSAQTACQENGHWSTTVPTCQAGPLTIQEALTYFGGAVASTIGLIMGGTLLALLRKRFRQKDDGKCPLNPHSHLGTYGVFTNAAFDPSP

SEQ ID NO: 540 - protein, 830 aa, Homo sapiens
MANCQIAILYQRFQRVVFGISQLLCFSALISELTNQKEVAAWTYHYSTKAYSWNISRKYCQNRYTDLVAIQNKNEIDYLNKVLPYYSSYYWIGIRKNNKTWTWVGTKKALTNEAENWADNEPNNKRNNEDCVEIYIKSPSAPGKWNDEHCLKKKHALCYTASCQDMSCSKQGECLETIGNYTCSCYPGFYGPECEYVRECGELELPQHVLMNCSHPLGNFSFNSQCSFHCTDGYQVNGPSKLECLASGIWTNKPPQCLAAQCPPLKIPERGNMTCLHSAKAFQHQSSCSFSCEEGFALVGPEVVQCTASGVWTAPAPVCKAVQCQHLEAPSEGTMDCVHPLTAFAYGSSCKFECQPGYRVRGLDMLRCIDSGHWSAPLPTCEAISCEPLESPVHGSMDCSPSLRAFQYDTNCSFRCAEGFMLRGADIVRCDNLGQWTAPAPVCQALQCQDLPVPNEARVNCSHPFGAFRYQSVCSFTCNEGLLLVGASVLQCLATGNWNSVPPECQAIPCTPLLSPQNGTMTCVQPLGSSSYKSTCQFICDEGYSLSGPERLDCTRSGRWTDSPPMCEAIKCPELFAPEQGSLDCSDTRGEFNVGSTCHFSCDNGFKLEGPNNVECTTSGRWSATPPTCKGIASLPTPGVQCPALTTPGQGTMYCRHHPGTFGFNTTCYFGCNAGFTLIGDSTLSCRPSGQWTAVTPACRAVKCSELHVNKPIAMNCSNLWGNFSYGSICSFHCLEGQLLNGSAQTACQENGHWSTTVPTCQAGPLTIQEALTYFGGAVASTIGLIMGGTLLALLRKRFRQKDDGKCPLNPHSHLGTYGVFTNAAFDPSP

SEQ ID NO: 541 - protein, 830 aa, Homo sapiens; identical to SEQ ID NO: 540

SEQ ID NO: 542 - protein, 2224 aa, Homo sapiens
MFPGCPRLWVLVVLGTSWVGWGSQGTEAAQLRQFYVAAQGISWSYRPEPTNSSLNLSVTSFKKIVYREYEPYFKKEKPQSTISGLLGPTLYAEVGDIIKVHFKNKADKPLSIHPQGIRYSKLSEGASYLDHTFPAEKMDDAVAPGREYTYEWSISEDSGPTHDDPPCLTHIYYSHENLIEDFNSGLIGPLLICKKGTLTEGGTQKTFDKQIVLLFAVFDESKSWSQSSSLMYTVNGYVNGTMPDITVCAHDHISWHLLGMSSGPELFSIHFNGQVLEQNHHKVSAITLVSATSTTANMTVGPEGKWIISSLTPKHLQAGMQAYIDIKNCPKKTRNLKKITREQRRHMKRWEYFIAAEEVIWDYAPVIPANMDKKYRSQHLDNFSNQIGKHYKKVMYTQYEDESFTKHTVNPNMKEDGILGPIIRAQVRDTLKIVFKNMASRPYSIYPHGVTFSPYEDEVNSSFTSGRNNTMIRAVQPGETYTYKWNILEFDEPTENDAQCLTRPYYSDVDIMRDIASGLIGLLLICKSRSLDRRGIQRAADIEQQAVFAVFDENKSWYLEDNINKFCENPDEVKRDDPKFYESNIMSTINGYVPESITTLGFCFDDTVQWHFCSVGTQNEILTIHFTGHSFIYGKRHEDTLTLFPMRGESVTVTMDNVGTWMLTSMNSSPRSKKLRLKFRDVKCIPDDDEDSYEIFEPPESTVMATRKMHDRLEPEDEESDADYDYQNRLAAALGIRSFRNSSLNQEEEEFNLTALALENGTEFVSSNTDIIVGSNYSSPSNISKFTVNNLAEPQKAPSHQQATTAGSPLRHLIGKNSVLNSSTAEHSSPYSEDPIEDPLQPDVTGIRLLSLGAGEFKSQEHAKHKGPKVERDQAAKHRFSWMKLLAHKVGRHLSQDTGSPSGMRPWEDLPSQDTGSPSRMRPWKDPPSDLLLLKQSNSSKILVGRWHLASEKGSYEIIQDTDEDTAVNNWLISPQNASRAWGESTPLANKPGKQSGHPKFPRVRHKSLQVRQDGGKSRLKKSQFLIKTRKKKKEKHTHHAPLSPRTFHPLRSEAYNTFSERRLKHSLVLHKSNETSLPTDLNQTLPSMDFGWIASLPDHNQNSSNDTGQASCPPGLYQTVPPEEHYQTFPIQDPDQMHSTSDPSHRSSSPELSEMLEYDRSHKSFPTDISQMSPSSEHEVWQTVISPDLSQVTLSPELSQTNLSPDLSHTTLSPELIQRNLSPALGQMPISPDLSHTTLSPDLSHTTLSLDLSQTNLSPELSQTNLSPALGQMPLSPDLSHTTLSLDFSQTNLSPELSHMTLSPELSQTNLSPALGQMPISPDLSHTTLSLDFSQTNLSPELSQTNLSPALGQMPLSPDPSHTTLSLDLSQTNLSPELSQTNLSPDLSEMPLFADLSQIPLTPDLDQMTLSPDLGETDLSPNFGQMSLSPDLSQVTLSPDISDTTLLPDLSQISPPPDLDQIFYPSESSQSLLLQEFNESFPYPDLGQMPSPSSPTLNDTFLSKEFNPLVIVGLSKDGTDYIEIIPKEEVQSSEDDYAEIDYVPYDDPYKTDVRTNINSSRDPDNIAAWYLRSNNGNRRNYYIAAEEISWDYSEFVQRETDIEDSDDIPEDTTYKKVVFRKYLDSTFTKRDPRGEYEEHLGILGPIIRAEVDDVIQVRFKNLASRPYSLHAHGLSYEKSSEGKTYEDDSPEWFKEDNAVQPNSSYTYVWHATERSGPESPGSACRAWAYYSAVNPEKDIHSGLIGPLLICQKGILHKDSNMPMDMREFVLLFMTFDEKKSWYYEKKSRSSWRLTSSEMKKSHEFHAINGMIYSLPGLKMYEQEWVRLHLLNIGGSQDIHVVHFHGQTLLENGNKQHQLGVWPLLPGSFKTLEMKASKPGWWLLNTEVGENQRAGMQTPFLIMDRDCRMPMGLSTGIISDSQIKASEFLGYWEPRLARLNNGGSYNAWSVEKLAAEFASKPWIQVDMQKEVIITGIQTQGAKHYLKSCYTTEFYVAYSSNQINWQIFKGNSTRNVMYFNGNSDASTIKENQFDPPIVARYIRISPTRAYNRPTLRLELQGCEVNGCSTPLGMENGKIENKQITASSFKKSWWGDYWEPFRARLNAQGRVNAWQAKANNNKQWLEIDLLKIKKITAIITQGCKSLSSEMYVKSYTIHYSEQGVEWKPYRLKSSMVDKIFEGNTNTKGHVKNFFNPPIISRFIRVIPKTWNQSIALRLELFGCDIY

SEQ ID NO: 543 - protein, 664 aa, Homo sapiens
MKTGLFFLCLLGTAAAIPTNARLLSDHSKPTAETVAPDNTAIPSLRAEAEENEKETAVSTEDDSHHKAEKSSVLKSKEESHEQSAEQGKSSSQELGLKDQEDSDGHLSVNLEYAPTEGTLDIKEDMSEPQEKKLSENTDFLAPGVSSFTDSNQQESITKREENQEQPRNYSHHQLNRSSKHSQGLRDQGNQEQDPNISNGEEEEEKEPGEVGTHNDNQERKTELPREHANSKQEEDNTQSDDILEESDQPTQVSKMQEDEFDQGNQEQEDNSNAEMEEENASNVNKHIQETEWQSQEGKTGLEAISNHKETEEKTVSEALLMEPTDDGNTTPRNHGVDDDGDDDGDDGGTDGPRHSASDDYFIPSQAFLEAERAQSIAYHLKIEEQREKVHENENIGTTEPGEHQEAKKAENSSNEEETSSEGNMRVHAVDSCMSFQCKRGHICKADQQGKPHCVCQDPVTCPPTKPLDQVCGTDNQTYASSCHLFATKCRLEGTKKGHQLQLDYFGACKSIPTCTDFEVIQFPLRMRDWLKNILMQLYEANSEHAGYLNEKQRNKVKKIYLDEKRLLAGDHPIDLLLRDFKKNYHMYVYPVHWQFSELDQHPMDRVLTHSELAPLRASLVPMEHCITRFFEECDPNKDKHITLKEWGHCFGIKEEDIDENLLF

SEQ ID NO: 544 - protein, 664 aa, Homo sapiens; identical to SEQ ID NO: 543

SEQ ID NO: 545 - protein, 132 aa, Homo sapiens
MAFDSTWKVDRSENYDKFMEKMGVNIVKRKLAAHDNLKLTITQEGNKFTVKESSAFRNIEVVFELGVTFNYNLADGTELRGTWSLEGNKLIGKFKRTDNGNELNTVREIIGDELVQTYVYEGVEAKRIFKKD

SEQ ID NO: 546 - protein, 488 aa, Homo sapiens
MAPAAWLRSAAARALLPPMLLLLLQPPPLLARALPPDVHHLHAERRGPQPWHAALPSSPAPAPATQEAPRPASSLRPPRCGVPDPSDGLSARNRQKRFVLSGGRWEKTDLTYRILRFPWQLVQEQVRQTMAEALKVWSDVTPLTFTEVHEGRADIMIDFARYWHGDDLPFDGPGGILAHAFFPKTHREGDVHFDYDETWTIGDDQGTDLLQVAAHEFGHVLGLQHTTAAKALMSAFYTFRYPLSLSPDDCRGVQHLYGQPWPTVTSRTPALGPQAGIDTNEIAPLEPDAPPDACEASFDAVSTIRGELFFFKAGFVWRLRGGQLQPGYPALASRHWQGLPSPVDAAFEDAQGHIWFFQGAQYWVYDGEKPVLGPAPLTELGLVRFPVHAALVWGPEKNKIYFFRGRDYWRFHPSTRRVDSPVPRRATDWRGVPSEIDAAFQDADGYAYFLRGRLYWKFDPVKVKALEGFPRLVGPDFFGCAEPANTFL

SEQ ID NO: 547 - protein, 994 aa, Homo sapiens
MRVHPRPHSRLAAKLAGLEPETPYPGFEFSELVTGATGTGDLTRKEPTELGASEMADEALAGLDEGALRKLLEVTADLAERRRIRSAIRELQRQELEREEEALASKRFRAERQDNKENWLHSQQREAEQRAALARLAGQLESMNDVEELTALLRSAGEYEERKLIRAAIRRVRAQEIEAATLAGRLYSGRPNSGSREDSKGLAAHRLEQCEVPEREEQEQQAEVSKPTPTPEGTSQDVTTVTLLLRAPPGSTSSSPASPSSSPTPASPEPPLEPAEAQCLTAEVPGSPEPPPSPPKTTSPEPQESPTLPSTEGQVVNKLLSGPKETPAAQSPTRGPSDTKRADVAGPRPCQRSLSVLSPRQPAQNRESTPLASGPSSFQRAGSVRDRVHKFTSDSPMAARLQDGTPQAALSPLTPARLLGPSLTSTTPASSSSGSSSRGPSDTSSRFSKEQRGVAQPLAQLRSCPQEEGPRGRGLAARPLENRAGGPVARSEEPGAPLPVAVGTAEPGGSMKTTFTIEIKDGRGQASTGRVLLPTGNQRAELTLGLRAPPTLLSTSSGGKSTITRVNSPGTLARLGSVTHVTSFSHAPPSSRGGCSIKMEPEPAEPLAAAVEAANGAEQTRVNKAPEGRSPLSAEELMTIEDEGVLDKMLDQSTDFEERKLIRAALRELRQRKRDQRDKERERRLQEARGRPGEGRGNTATETTTRHSQRAADGSAVSTVTKTERLVHSNDGTRTARTTTVESSFVRRSENGSGSTMMQTKTFSSSSSSKKMGSIFDREDQASPRAGSLAALEKRQAEKKKELMKAQSLPKTSASQARKAMIEKLEKEGAAGSPGGPRAAVQRSTSFGVPNANSIKQMLLDWCRAKTRGYEHVDIQNFSSSWSDGMAFCALVHNFFPEAFDYGQLSPQNRRQNFEVAFSSAETHADCPQLLDTEDMVRLREPDWKMLVDCVPLVEVDDMMIMGKKPDPKCVFTYVQSLYNHLRRHELRLRGKNV

SEQ ID NO: 548 - protein, 971 aa, Homo sapiens
MRVHPRPHSRLAAKLAGLEPETPYPGFEFSELVTGATGTGDLTRKEPTELGASEMADEALAGLDEGALRKLLEVTADLAERRRIRSAIRELQRQELEREEEALASKRFRAERQDNKENWLHSQQREAEQRAALARLAGQLESMNDVEELTALLRSAGEYEERKLIRAAIRRVRAQEIEAATLAGRLYSGRPNSGSREDSKGLAAHRLEQCEVPEREEQEQQAEVSKPTPTPEGTSQDVTTVTLLLRAPPGSTSSSPASPSSSPTPASPEPPLEPAEAQCLTAEVPGSPEPPPSPPKTTSPEPQESPTLPSTEGQVVNKLLSGPKETPAAQSPTRGPSDTKRADVAGPRPCQRSLSVLSPRQPAQNRESTPLASGPSSFQRAGSVRDRVHKFTSDSPMAARLQDGTPQAALSPLTPARLLGPSLTSTTPASSSSGSSSRGPSDTSSRFSKEQRGVAQPLAQLRSCPQEEGPRGRGLAARPLENRAGGPVARSEEPGAPLPVAVGTAEPGGSMKTTFTIEIKDGRGQASTGRVLLPTGNQRAELTLGLRAPPTLLSTSSGGKSTITRVNSPGTLARLGSVTHVTSFSHAPPSSRGGCSIKMEPEPAEPLAAAVEAANGAEQTRVNKAPEGRSPLSAEELMTIEDEGVLDKMLDQSTDFEERKLIRAALRELRQRKRDQRDKERERRLQEARGRPGEGRGNTATETTTRHSQRAADGSAVSTVTKTERLVHSNDGTRTARTTTVESSFVRRSENGSGSTMMQTKTFSSSSSSKKMGSIFDREDQASPRAGSLAALEKRQAEKKKELMKAQSLPKTSASQARKAMIEKLEKEGAAGSPGGPRAAVQRSTSFGVPNANSIKQMLLDWCRAKTRGYEHVDIQNFSSSWSDGMAFCALVHNFFPEAFDYGQLSPQNRRQNFEVAFSSAEMLVDCVPLVEVDDMMIMGKKPDPKCVFTYVQSLYNHLRRHELRLRGKNV

SEQ ID NO: 549 - protein, 917 aa, Homo sapiens [sequence omitted]

SEQ ID NO: 550 - protein, 915 aa, Homo sapiens [sequence omitted]

SEQ ID NO: 551 - protein, 969 aa, Homo sapiens [sequence omitted]

SEQ ID NO: 552 - protein, 940 aa, Homo sapiens [sequence omitted]

SEQ ID NO: 553 - protein, 331 aa, Homo sapiens
MDSEKKRFTEEATKYFRERVSPVHLQILLTNNEAWKRFVTAAELPRDEADALYEALKKLRTYAAIEDEYVQQKDEQFREWFLKEFPQVKRKIQESIEKLRALANGIEEVHRGCTISNVVSSSTGAASGIMSLAGLVLAPFTAGTSLALTAAGVGLGAASAVTGITTSIVEHSYTSSAEAEASRLTATSIDRLKVFKEVMRDITPNLLSLLNNYYEATQTIGSEIRAIRQARARARLPVTTWRISAGSGGQAERTIAGTTRAVSRGARILSATTSGIFLALDVVNLVYESKHLHEGAKSASAEELRRQAQELEENLMELTQIYQRLNPCHTH

SEQ ID NO: 554 - protein, 331 aa, Homo sapiens; identical to SEQ ID NO: 553

SEQ ID NO: 555 - protein, 402 aa, Homo sapiens [sequence omitted]

SEQ ID NO: 556 - protein, 331 aa, Homo sapiens; identical to SEQ ID NO: 553

SEQ ID NO: 557 - protein, 1141 aa, Homo sapiens
MDDSGELGGLETMETLTELGDELTLGDIDEMLQFVSNQVGEFPDLFSEQLCSSFPGSGGSGSSSGSSGSSSSSSNGRGSSSGAVDPSVQRSFTQVTLPSFSPSAASPQAPTLQVKVSPTSVPTTPRATPILQPRPQPQPQPQTQLQQQTVMITPTFSTTPQTRIIQQPLIYQNAATSFQVLQPQVQSLVTSSQVQPVTIQQQVQTVQAQRVLTQTANGTLQTLAPATVQTVAAPQVQQVPVLVQPQIIKTDSLVLTTLKTDGSPVMAAVQNPALTALTTPIQTAALQVPTLVGSSGTILTTMPVMMGQEKVPIKQVPGGVKQLEPPKEGERRTTHNIIEKRYRSSINDKIIELKDLVMGTDAKMHKSGVLRKAIDYIKYLQQVNHKLRQENMVLKLANQKNKLLKGIDLGSLVDNEVDLKIEDFNQNVLLMSPPASDSGSQAGFSPYSIDSEPGSPLLDDAKVKDEPDSPPVALGMVDRSRILLCVLTFLCLSFNPLTSLLQWGGAHDSDQHPHSGSGRSVLSFESGSGGWFDWMMPTLLLWLVNGVIVLSVFVKLLVHGEPVIRPHSRSSVTFWRHRKQADLDLARGDFAAAAGNLQTCLAVLGRALPTSRLDLACSLSWNVIRYSLQKLRLVRWLLKKVFQCRRATPATEAGFEDEAKTSARDAALAYHRLHQLHITGKLPAGSACSDVHMALCAVNLAECAEEKIPPSTLVEIHLTAAMGLKTRCGGKLGFLASYFLSRAQSLCGPEHSAVPDSLRWLCHPLGQKFFMERSWSVKSAAKESLYCAQRNPADPIAQVHQAFCKNLLERAIESLVKPQAKKKAGDQEEESCEFSSALEYLKLLHSFVDSVGVMSPPLSRSSVLKSALGPDIICRWWTSAITVAISWLQGDDAAVRSHFTKVERIPKALEVTESPLVKAIFHACRAMHASLPGKADGQQSSFCHCERASGHLWSSLNVSGATSDPALNHVVQLLTCDLLLSLRTALWQKQASASQAVGETYHASGAELAGFQRDLGSLRRLAHSFRPAYRKVFLHEATVRLMAGASPTRTHQLLEHSLRRRTTQSTKHGEVDAWPGQRERATAILLACRHLPLSFLSSPGQRAVLLAEAARTLEKVGDRRSCNDCQQMIVKLGGGTAIAAS

SEQ ID NO: 558 - protein, 1141 aa, Homo sapiens; identical to SEQ ID NO: 557

SEQ ID NO: 559 - protein, 644 aa, Homo sapiens
MAKPSHSSYVLQQLNNQREWGFLCDCCIAIDDIYFQAHKAVLAACSSYFRMFFMNHQHSTAQLNLSNMKISAECFDLILQFMYLGKIMTAPSSFEQFKVAMNYLQLYNVPDCLEDIQDADCSSSKCSSSASSKQNSKMIFGVRMYEDTVARNGNEANRWCAEPSSTVNTPHNREADEESLQLGNFPEPLFDVCKKSSVSKLSTPKERVSRRFGRSFTCDSCGFGFSCEKLLDEHVLTCTNRHLYQNTRSYHRIVDIRDGKDSNIKAEFGEKDSSKTFSAQTDKYRGDTSQAADDSASTTGSRKSSTVESEIASEEKSRAAERKRIIIKMEPEDIPTDELKDFNIIKVTDKDCNESTDNDELEDEPEEPFYRYYVEEDVSIKKSGRKTLKPRMSVSADERGGLENMRPPNNSSPVQEDAENASCELCGLTITEEDLSSHYLAKHIENICACGKCGQILVKGRQLQEHAQRCGEPQDLTMNGLGNTEEKMDLEENPDEQSEIRDMFVEMLDDFRDNHYQINSIQKKQLFKHSACPFRCPNCGQRFETENLVVEHMSSCLDQDMFKSAIMEENERDHRRKHFCNLCGKGFYQRCHLREHYTVHTKEKQFVCQTCGKQFLRERQLRLHNDMHKGMASGEIGPSKPVEK

SEQ ID NO: 560 - protein, 94 aa, Homo sapiens
MDTASHSLVLLQQLNMQREFGFLCDCTVAIGDVYFKAHRAVLAAFSNYFKMIFIHQTRKRKMSCTICGHKFPRKSQLLEHMYTHKDSKSPTLRS

SEQ ID NO: 561 - protein, 935 aa, Homo sapiens
MAPAEILNGKEISAQIRARLKNQVTQLKEQVPGFTPRLAILQVGNRDDSNLYINVKLKAAEEIGIKATHIKLPRTTTESEVMKYITSLNEDSTVHGFLVQLPLDSENSINTEEVINAIAPEKDVDGLTSINAGRLARGDLNDCFIPCTPKGCLELIKETGVPIAGRHAVVVGRSKIVGAPMHDLLLWNNATVTTCHSKTAHLDEEVNKGDILVVATGQPEMVKGEWIKPGAIVIDCGINYVPDDKKPNGRKVVGDVAYDEAKERASFITPVPGGVGPMTVAMLMQSTVESAKRFLEKFKPGKWMIQYNNLNLKTPVPSDIDISRSCKPKPIGKLAREIGLLSEEVELYGETKAKVLLSALERLKHRPDGKYVVVTGITPTPLGEGKSTTTIGLVQALGAHLYQNVFACVRQPSQGPTFGIKGGAAGGGYSQVIPMEEFNLHLTGDIHAITAANNLVAAAIDARIFHELTQTDKALFNRLVPSVNGVRRFSDIQIRRLKRLGIEKTDPTTLTDEEINRFARLDIDPETITWQRVLDTNDRFLRKITIGQAPTEKGHTRTAQFDISVASEIMAVLALTTSLEDMRERLGKMVVASSKKGEPVSAEDLGVSGALTVLMKDAIKPNLMQTLEGTPVFVHAGPFANIAHGNSSIIADQIALKLVGPEGFVVTEAGFGADIGMEKFFNIKCRYSGLCPHVVVLVATVRALKMHGGGPTVTAGLPLPKAYIQENLELVEKGFSNLKKQIENARMFGIPVVVAVNAFKTDTESELDLISRLSREHGAFDAVKCTHWAEGGKGALALAQAVQRAAQAPSSFQLLYDLKLPVEDKIRIIAQKIYGADDIELLPEAQHKAEVYTKQGFGNLPICMAKTHLSLSHNPEQKGVPTGFILPIRDIRASVGAGFLYPLVGTMSTMPGLPTRPCFYDIDLDPETEQVNGLF

SEQ ID NO: 562 - protein, 935 aa, Homo sapiens; identical to SEQ ID NO: 561

SEQ ID NO: 563 - protein, 364 aa, Homo sapiens
MPLLLLLPLLWAGALAMDPNFWLQVQESVTVQEGLCVLVPCTFFHPIPYYDKNSPVHGYWFREGAIISRDSPVATNKLDQEVQEETQGRFRLLGDPSRNNCSLSIVDARRRDNGSYFFRMERGSTKYSYKSPQLSVHVTDLTHRPKILIPGTLEPGHSKNLTCSVSWACEQGTPPIFSWLSAAPTSLGPRTTHSSVLIITPRPQDHGTNLTCQVKFAGAGVTTERTIQLNVTYVPQNPTTGIFPGDGSGKQETRAGVVHGAIGGAGVTALLALCLCLIFFIVKTHRRKAARTAVGRNDTHPTTGSASPKHQKKSKLHGPTETSSCSGAAPTVEMDEELHYASLNFHGMNPSKDTSTEYSEVRTQ

SEQ ID NO: 564 - protein, 221 aa, Homo sapiens
MPLLLLLPLLWADLTHRPKILIPGTLEPGHSKNLTCSVSWACEQGTPPIFSWLSAAPTSLGPRTTHSSVLIITPRPQDHGTNLTCQVKFAGAGVTTERTIQLNVTWKQETRAGVVHGAIGGAGVTALLALCLCLIFFIVKTHRRKAARTAVGRNDTHPTTGSASPKHQKKSKLHGPTETSSCSGAAPTVEMDEELHYASLNFHGMNPSKDTSTEYSEVRTQ

SEQ ID NO: 565 - protein, 237 aa, Homo sapiens
MPLLLLLPLLWADLTHRPKILIPGTLEPGHSKNLTCSVSWACEQGTPPIFSWLSAAPTSLGPRTTHSSVLIITPRPQDHGTNLTCQVKFAGAGVTTERTIQLNVTYVPQNPTTGIFPGDGSGKQETRAGVVHGAIGGAGVTALLALCLCLIFFIVKTHRRKAARTAVGRNDTHPTTGSASPKHQKKSKLHGPTETSSCSGAAPTVEMDEELHYASLNFHGMNPSKDTSTEYSEVRTQ

SEQ ID NO: 566 - protein, 72 aa, Homo sapiens
MSPEVVPGTAGAVQRLDVAVEGEITASRAPRLAPTLWAPSTLSPPSLQEAWLSAGHLPPWVTPSESGTRRLW

SEQ ID NO: 567 - protein, 179 aa, Homo sapiens [sequence omitted]

SEQ ID NO: 568 - protein, 179 aa, Homo sapiens [sequence omitted]

SEQ ID NO: 569 - DNA, 201 bp, Homo sapiens
atctctcggtgttcttccgaaagcacatcaccaagcgcttctgcaaacaatgtccagttttctacagggagacagtggatggagtgacttcaacaaacacrccttccactggggagcaggaagtctcggctggtttataaaacgaggagcagtttgattgttgtttataaagggagataacaatctgtatataacaacaaa

SEQ ID NO: 570 - DNA, 201 bp, Homo sapiens
atgtccagttttctacagggagacagtggatggagtgacttcaacaaacacgccttccactggggagcaggaagtctcggctggtttataaaacgaggagyagtttgattgttgtttataaagggagataacaatctgtatataacaacaaacttcaagggtttgttgaacaatagaaacctgtaaagcaggtgcccagga

SEQ ID NO: 571 - DNA, 132 bp, Homo sapiens
tgtaggattgccccactccaaaaaccagtgtgtggaggtccaggagtgagaccaggaaagaatgtgaaagtgactacacaaggactcctcgatggtcgtgraaaaggaaagtcaattggcagagcccctgaa

SEQ ID NO: 572 - DNA, 201 bp, Homo sapiens
tccctgtcataaatttgacgtgaagcaaattggggcccaactcctgcctccgctctactcgctggtgttcatctttggttttgtgggcaacatgctggtcrtcctcatcttaataaactgcaaaaagctgaagtgcttgactgacatttacctgctcaacctggccatctctgatctgctttttcttattactctcccatt

SEQ ID NO: 573 - DNA, 179 bp, Homo sapiens
cctcactcttctcttttccccacagcctttttcacatagctcttggctgtaggattgccccactccaaaaaccagtgtgtggaggtccaggagtgagaccrggaaagaatgtgaaagtgactacacaaggactcctcgatggtcgtggaaaaggaaagtcaattggcagagcccctgaa

SEQ ID NO: 574 - DNA, 201 bp, Homo sapiens
ccaggaggtagtgattatgagaagggggtggagaatgatgagttccttcaccaggagcaaaggacggggatcgtgtggaaccactgcagaactatttccgraatcaactaagtggagagagccaggaaggctgcatcagaacccagtaaagcttcttgtctggatctgagctggtttgttttgtgcttgcttttccctgcc

SEQ ID NO: 575 - DNA, 201 bp, Homo sapiens
aaaccctgcttcggtgtcgaaacgagaagaagaggcatagggcagtgagagtcatcttcaccatcatgattgtttactttctcttctggactccctataayattgtcattctcctgaacaccttccaggaattcttcggcctgagtaactgtgaaagcaccagtcaactggaccaagccacgcaggtgacagagactcttg

SEQ ID NO: 576 - DNA, 195 bp, Homo sapiens
gaacagagaaagtggattgaacaaggacgcatttccccagtacatccacaacatgctgtccacatctcgttctcggtttatcagaaataccaacragagcggtgaagaagtcaccaccttttttgattatgattacggtgctccctgtcataaatttgacgtgaagcaaattggggcccaactcctgcctccgct

SEQ ID NO: 577 - DNA, 201 bp, Homo sapiens; identical to SEQ ID NO: 569

SEQ ID NO: 578 - DNA, 201 bp, Homo sapiens; identical to SEQ ID NO: 572

SEQ ID NO: 579 - DNA, 201 bp, Homo sapiens
aactatatttttctgattttttttttcaaatctttaccattagttgccctgtatctccgccttcactttctgcaggaaactttatttcctacttctgcatrccaagtttctacctctagatctgtttggttcagttgctgagaagcctgacataccaggactgcctgagacaagccacaagctgaacagagaaagtggatt

SEQ ID NO: 580 - DNA, 201 bp, Homo sapiens
tctttaccattagttgccctgtatctccgccttcactttctgcaggaaactttatttcctacttctgcatgccaagtttctacctctagatctgtttggtycagttgctgagaagcctgacataccaggactgcctgagacaagccacaagctgaacagagaaagtggattgaacaaggacgcatttccccagtacatcca

SEQ ID NO: 581 - DNA, 201 bp, Homo sapiens; identical to SEQ ID NO: 570

SEQ ID NO: 582 - DNA, 201 bp, Homo sapiens; identical to SEQ ID NO: 575

SEQ ID NO: 583 - DNA, 201 bp, Homo sapiens
caagctgaacagagaaagtggattgaacaaggacgcatttccccagtacatccacaacatgctgtccacatctcgttctcggtttatcagaaataccaacragagcggtgaagaagtcaccaccttttttgattatgattacggtgctccctgtcataaatttgacgtgaagcaaattggggcccaactcctgcctccgct

SEQ ID NO: 584 - DNA, 201 bp, Homo sapiens
tgtaggattgccccactccaaaaaccagtgtgtggaggtccaggagtgagaccaggaaagaatgtgaaagtgactacacaaggactcctcgatggtcgtgraaaaggaaagtcaattggcagagcccctgaagccagtcttcaggacaaagaaggagcctagagacagaaatgacagatctctgctttggaaatcacacgt

SEQ ID NO: 585 - DNA, 201 bp, Homo sapiens; identical to SEQ ID NO: 579

SEQ ID NO: 586 - DNA, 201 bp, Homo sapiens; identical to SEQ ID NO: 572

SEQ ID NO: 587 - DNA, 201 bp, Homo sapiens; identical to SEQ ID NO: 580

SEQ ID NO: 588 - DNA, 201 bp, Homo sapiens
ccttcgttggggagaagttcagaagcctttttcacatagctcttggctgtaggattgccccactccaaaaaccagtgtgtggaggtccaggagtgagaccrggaaagaatgtgaaagtgactacacaaggactcctcgatggtcgtggaaaaggaaagtcaattggcagagcccctgaagccagtcttcaggacaaagaag

SEQ ID NO: 589 - DNA, 201 bp, Homo sapiens; identical to SEQ ID NO: 575

SEQ ID NO: 590 - DNA, 201 bp, Homo sapiens
gaagtcatgcgtttaatcacattcgagtgtttcagtgcttcgcagatgtccttgatgctcatattgttccctattttgccagtgggaactcctaaatcaarttggcttctaatcaaagcttttaaaccctattggtaaagaatggaaggtggagaagctccctgaagtaagcaaagactttcctcttagtcgagccaagtt

SEQ ID NO: 591 - DNA, 201 bp, Homo sapiens; identical to SEQ ID NO: 583

SEQ ID NO: 592 - DNA, 201 bp, Homo sapiens
ttgaatacaggcatagagttcagactttttttaaatagtaaaaataaaattaaagctgaaaactgcaacttgtaaatgtggtaaagagttagtttgagttrctatcatgtcaaacgtgaaaatgctgtattagtcacagagataattctagctttgagcttaagaattttgagcaggtggtatgtttgggagactgctgag

SEQ ID NO: 593 - DNA, 201 bp, Homo sapiens
cggctggatgcgcacaaggtcctgtctgccctgcaggctgtacagggcctgctagtggcccagggcagggctgatagccaggcccagctgctgctgtccayggtggtgggcgtgttcacagccccaggcctgcacctgaagcagccgtttgtgcagggcctggctctctatacccctgtggtcctcccacgctctctggac

SEQ ID NO: 594 - DNA, 201 bp, Homo sapiens
agcctgtggtctggccaagtgatgtaaccctcctctccagcctgtgcacaggcagcctgggaacagctccatccccacccctcagctataaatagggcatygtgacccggccaggggaagaagctgccgttgttctgggtactacagcagaagggtatgcggaagcgagcaccccagtctgagatggctcctgccggtgtg

SEQ ID NO: 595 - DNA, 201 bp, Homo sapiens
ggccaagtgatgtaaccctcctctccagcctgtgcacaggcagcctgggaacagctccatccccacccctcagctataaatagggcatcgtgacccggccrggggaagaagctgccgttgttctgggtactacagcagaagggtatgcggaagcgagcaccccagtctgagatggctcctgccggtgtgagcctgagggcc

SEQ ID NO: 596 - DNA, 201 bp, Homo sapiens
ctcccacgctctctggacttcacagaactggatgttgctgctgagaagattgacaggttcatgcaggctgtgacaggatggaagactggctgctccctgaygggagccagtgtggacagcaccctggctttcaacacctacgtccacttccaagggaagatgaagggcttctccctgctggccgagccccaggagttctgg

SEQ ID NO: 597 - DNA, 201 bp, Homo sapiens
ccctcctctccagcctgtgcacaggcagcctgggaacagctccatccccacccctcagctataaatagggcatcgtgacccggccaggggaagaagctgcygttgttctgggtactacagcagaagggtatgcggaagcgagcaccccagtctgagatggctcctgccggtgtgagcctgagggccaccatcctctgcctc

SEQ ID NO: 598 - DNA, 201 bp, Homo sapiens
ccagcctgtggtctggccaagtgatgtaaccctcctctccagcctgtgcacaggcagcctgggaacagctccatccccacccctcagctataaatagggcmtcgtgacccggccaggggaagaagctgccgttgttctgggtactacagcagaagggtatgcggaagcgagcaccccagtctgagatggctcctgccggtg

SEQ ID NO: 599 - DNA, 201 bp, Homo sapiens
gacctggacaaggtggagggtctcactttccagcaaaactccctcaactggatgaagaaactgtctccccggaccatccacctgaccatgccccaactggygctgcaaggatcttatgacctgcaggacctgctcgcccaggctgagctgcccgccattctgcacaccgagctgaacctgcaaaaattgagcaatgaccgc

SEQ ID NO: 600 - DNA, 201 bp, Homo sapiens
gtgttcacagccccaggcctgcacctgaagcagccgtttgtgcagggcctggctctctatacccctgtggtcctcccacgctctctggacttcacagaackggatgttgctgctgagaagattgacaggttcatgcaggctgtgacaggatggaagactggctgctccctgatgggagccagtgtggacagcaccctggct

SEQ ID NO: 601 - DNA, 201 bp, Homo sapiens
accccaccttcatacctgctccaattcaggccaagacatcccctgtggatgaaaaggccctacaggaccagctggtgctagtcgctgcaaaacttgacacygaagacaagttgagggccgcaatggtcgggatgctggccaacttcttgggcttccgtatatatggcatgcacagtgagctatggggcgtggtccatgggg

SEQ ID NO: 602 - DNA, 201 bp, Homo sapiens
gagggccaccatcctctgcctcctggcctgggctggcctggctgcaggtgaccgggtgtacatacaccccttccacctcgtcatccacaatgagagtaccygtgagcagctggcaaaggccaatgccgggaagcccaaagaccccaccttcatacctgctccaattcaggccaagacatcccctgtggatgaaaaggccct

SEQ ID NO: 603 - DNA, 201 bp, Homo sapiens
gaacagctccatccccacccctcagctataaatagggcatcgtgacccggccaggggaagaagctgccgttgttctgggtactacagcagaagggtatgcrgaagcgagcaccccagtctgagatggctcctgccggtgtgagcctgagggccaccatcctctgcctcctggcctgggctggcctggctgcaggtgaccgg

SEQ ID NO: 604 - DNA, 201 bp, Homo sapiens
gcaatggtcgggatgctggccaacttcttgggcttccgtatatatggcatgcacagtgagctatggggcgtggtccatggggccaccgtcctctccccaayggctgtctttggcaccctggcctctctctatctgggagccttggaccacacagctgacaggctacaggcaatcctgggtgttccttggaaggacaagaac

SEQ ID NO: 605 - DNA, 201 bp, Homo sapiens
tgtagtgtctgtaataccttagttttttccacagatgcttgtgatttttgaacaatacgtgaaagatgcaagcacctgaatttctgtttgaatgcggaacmatagctggttatttctcccttgtgttagtaataaacgtcttgccacaataagcctccaaaaattttatctttcatttagcagccaaacagatgtatacaa

SEQ ID NO: 606 - DNA, 201 bp, Homo sapiens
tcaaagcgccactgccctgcacttcctgggccgcgtggccaacccgctgagcacagcatgaggccagggccccagaacacagtgcctggcaaggcctctgyccctggcctttgaggcaaaggccagcagcagataacaaccccggacaaatcagcgatgtgtcacccccagtctcccaccttttcttctaatgagtcgact

SEQ ID NO: 607 - DNA, 201 bp, Homo sapiens
aaggccagcagcagataacaaccccggacaaatcagcgatgtgtcacccccagtctcccaccttttcttctaatgagtcgactttgagctggaaagcagcsgtttctccttggtctaagtgtgctgcatggagtgagcagtagaagcctgcagcggcacaaatgcacctcccagtttgctgggtttattttagagaatggg

SEQ ID NO: 608 - DNA, 201 bp, Homo sapiens
caccatcctctgcctcctggcctgggctggcctggctgcaggtgaccgggtgtacatacaccccttccacctcgtcatccacaatgagagtacctgtgagyagctggcaaaggccaatgccgggaagcccaaagaccccaccttcatacctgctccaattcaggccaagacatcccctgtggatgaaaaggccctacagga

SEQ ID NO: 609 - DNA, 201 bp, Homo sapiens
agcttgtttgtgaaacaaaaaagtgttcccttttcaagttgagaacaaaaattgggttttaaaattaaagtatacatttttgcattgccttcggtttgtakttagtgtcttgaatgtaagaacatgacctccgtgtagtgtctgtaataccttagttttttccacagatgcttgtgatttttgaacaatacgtgaaagatg

SEQ ID NO: 610 - DNA, 201 bp, Homo sapiens
agcagataacaaccccggacaaatcagcgatgtgtcacccccagtctcccaccttttcttctaatgagtcgactttgagctggaaagcagccgtttctccytggtctaagtgtgctgcatggagtgagcagtagaagcctgcagcggcacaaatgcacctcccagtttgctgggtttattttagagaatgggggtggggag

SEQ ID NO: 611 - DNA, 201 bp, Homo sapiens
cccctgtggatgaaaaggccctacaggaccagctggtgctagtcgctgcaaaacttgacaccgaagacaagttgagggccgcaatggtcgggatgctggcyaacttcttgggcttccgtatatatggcatgcacagtgagctatggggcgtggtccatggggccaccgtcctctccccaacggctgtctttggcaccctgg

SEQ ID NO: 612 - DNA, 201 bp, Homo sapiens
gacaaatcagcgatgtgtcacccccagtctcccaccttttcttctaatgagtcgactttgagctggaaagcagccgtttctccttggtctaagtgtgctgyatggagtgagcagtagaagcctgcagcggcacaaatgcacctcccagtttgctgggtttattttagagaatgggggtggggaggcaagaaccagtgttta

SEQ ID NO: 613 - DNA, 201 bp, Homo sapiens
acctgaatttctgtttgaatgcggaaccatagctggttatttctcccttgtgttagtaataaacgtcttgccacaataagcctccaaaaattttatctttyatttagcagccaaacagatgtatacaattcagcagatagactgtgcaaacgaaagtgctttcctggactttggatggaatttccatgggaggtctgagcc

SEQ ID NO: 614 - DNA, 201 bp, Homo sapiens
tctcactttccagcaaaactccctcaactggatgaagaaactgtctccccggaccatccacctgaccatgccccaactggtgctgcaaggatcttatgacmtgcaggacctgctcgcccaggctgagctgcccgccattctgcacaccgagctgaacctgcaaaaattgagcaatgaccgcatcagggtgggggaggtgct

SEQ ID NO: 615 - DNA, 201 bp, Homo sapiens
aatcagcgatgtgtcacccccagtctcccaccttttcttctaatgagtcgactttgagctggaaagcagccgtttctccttggtctaagtgtgctgcatgkagtgagcagtagaagcctgcagcggcacaaatgcacctcccagtttgctgggtttattttagagaatgggggtggggaggcaagaaccagtgtttagcgc

SEQ ID NO: 616 - DNA, 201 bp, Homo sapiens
aaatcagcgatgtgtcacccccagtctcccaccttttcttctaatgagtcgactttgagctggaaagcagccgtttctccttggtctaagtgtgctgcatkgagtgagcagtagaagcctgcagcggcacaaatgcacctcccagtttgctgggtttattttagagaatgggggtggggaggcaagaaccagtgtttagcg

SEQ ID NO: 617 - DNA, 201 bp, Homo sapiens
caaatgcacctcccagtttgctgggtttattttagagaatgggggtggggaggcaagaaccagtgtttagcgcgggactactgttccaaaaagaattccarccgaccagcttgtttgtgaaacaaaaaagtgttcccttttcaagttgagaacaaaaattgggttttaaaattaaagtatacatttttgcattgccttcgg

SEQ ID NO: 618 - DNA, 201 bp, Homo sapiens
gggtttattttagagaatgggggtggggaggcaagaaccagtgtttagcgcgggactactgttccaaaaagaattccaaccgaccagcttgtttgtgaaamaaaaaagtgttcccttttcaagttgagaacaaaaattgggttttaaaattaaagtatacatttttgcattgccttcggtttgtatttagtgtcttgaatg

SEQ ID NO: 619 - DNA, 201 bp, Homo sapiens; identical to SEQ ID NO: 593

SEQ ID NO: 620 - DNA, 201 bp, Homo sapiens; identical to SEQ ID NO: 596

SEQ ID NO: 621 - DNA, 201 bp, Homo sapiens; identical to SEQ ID NO: 599

SEQ ID NO: 622 - DNA, 201 bp, Homo sapiens; identical to SEQ ID NO: 600

SEQ ID NO: 623 - DNA, 201 bp, Homo sapiens; identical to SEQ ID NO: 601

SEQ ID NO: 624 - DNA, 201 bp, Homo sapiens; identical to SEQ ID NO: 602

SEQ ID NO: 625 - DNA, 201 bp, Homo sapiens
ctgagcacaatcagctgcaggaggtggctgctcagctgaaagcctgtggggacaaaggaggagacccaggactcgctgtatccgagccccgagggtatgcrgaagcgagcaccccagtctgagatggctcctgccggtgtgagcctgagggccaccatcctctgcctcctggcctgggctggcctggctgcaggtgaccgg

SEQ ID NO: 626 - DNA, 201 bp, Homo sapiens; identical to SEQ ID NO: 604

SEQ ID NO: 627 - DNA, 201 bp, Homo sapiens; identical to SEQ ID NO: 606

SEQ ID NO: 628 - DNA, 124 bp, Homo sapiens
aaagaaaggcgatgctaagaaacrtgctgcaggggaggctggcacattctgctccttagctaaccgcacaggcccatgggtccacacacatcagaccatggctctctgtggtctatctttgcca

SEQ ID NO: 629 - DNA, 201 bp, Homo sapiens; identical to SEQ ID NO: 607

SEQ ID NO: 630 - DNA, 201 bp, Homo sapiens; identical to SEQ ID NO: 608

SEQ ID NO: 631 - DNA, 201 bp, Homo sapiens; identical to SEQ ID NO: 610

SEQ ID NO: 632 - DNA, 201 bp, Homo sapiens; identical to SEQ ID NO: 611

SEQ ID NO: 633 - DNA, 201 bp, Homo sapiens; identical to SEQ ID NO: 612

SEQ ID NO: 634 - DNA, 201 bp, Homo sapiens; identical to SEQ ID NO: 614

SEQ ID NO: 635 - DNA, 201 bp, Homo sapiens; identical to SEQ ID NO: 615

SEQ ID NO: 636 - DNA, 201 bp, Homo sapiens; identical to SEQ ID NO: 616

SEQ ID NO: 637 - DNA, 201 bp, Homo sapiens
caaatgcacctcccagtttgctgggtttattttagagaatgggggtggggaggcaagaaccagtgtttagcgcgggactactgttccaaaaagaattccarccgaccagcttgtttgtgaaacaaaaaagtgttcccttttcaagttgagaacaaaaattgggttttaaaaacatgacctccgtgtagtgtctgtaatacc

SEQ ID NO: 638 - DNA, 201 bp, Homo sapiens
gggtttattttagagaatgggggtggggaggcaagaaccagtgtttagcgcgggactactgttccaaaaagaattccaaccgaccagcttgtttgtgaaamaaaaaagtgttcccttttcaagttgagaacaaaaattgggttttaaaaacatgacctccgtgtagtgtctgtaataccttagttttttccacagatgctt

SEQ ID NO: 639 - DNA, 201 bp, Homo sapiens
taaatttcactggcatgccacctgcagatgaagattacagcccctgtatgctagaaactgagacactcaacaagtatgttgtgatcatcgcctatgccctrgtgttcctgctgagcctgctgggaaactccctggtgatgctggtcatcttatacagcagggtcggccgctccgtcactgatgtctacctgctgaacctgg

SEQ ID NO: 640 - DNA, 125 bp, Homo sapiens
tttccctccttggagacagggccctgtcggtttattcactgtatgtccttggtgcctggagcctactaaatgctcaataaataatgatcacaggaatgaaygcatgctgaaaagaccactctttt

SEQ ID NO: 641 - DNA, 201 bp, Homo sapiens
gtcatctttgctgtcgtcctcatcttcctgctttgctggctgccctacaacctggtcctgctggcagacaccctcatgaggacccaggtgatccaggagasctgtgagcgccgcaacaacatcggccgggccctggatgccactgagattctgggatttctccatagctgcctcaaccccatcatctacgccttcatcggc

SEQ ID NO: 642 - DNA, 201 bp, Homo sapiens
atttcactggcatgccacctgcagatgaagattacagcccctgtatgctagaaactgagacactcaacaagtatgttgtgatcatcgcctatgccctagtrttcctgctgagcctgctgggaaactccctggtgatgctggtcatcttatacagcagggtcggccgctccgtcactgatgtctacctgctgaacctggcct

SEQ ID NO: 643 - DNA, 201 bp, Homo sapiens
tgaccaacatcgcagacacatgtgctggccacctgctgagccccaagtggaacgagacaagcagcccttagcccttcccctctgcagcttccaggctggcrtgcagcatcagcatccctagaaagccatgtgcagccaccagtccattgggcaggcagatgttcctaataaagcttctgttccgtgcttgtccctgtggaa

SEQ ID NO: 644 - DNA, 201 bp, Homo sapiens
tctgggccgcctccaaggtgaatggctggatttttggcacattcctgtgcaaggtggtctcactcctgaaggaagtcaacttctacagtggcatcctgctrttggcctgcatcagtgtggaccgttacctggccattgtccatgccacacgcacactgacccagaagcgtcacttggtcaagtttgtttgtcttggctgct

SEQ ID NO: 645 - DNA, 201 bp, Homo sapiens
ggggcagaagcaccgagccatgagggtcatctttgctgtcgtcctcatcttcctgctttgctggctgccctacaacctggtcctgctggcagacaccctcmtgaggacccaggtgatccaggagagctgtgagcgccgcaacaacatcggccgggccctggatgccactgagattctgggatttctccatagctgcctcaa

SEQ ID NO: 646 - DNA, 201 bp, Homo sapiens
ccctgaccttgcccatctgggccgcctccaaggtgaatggctggatttttggcacattcctgtgcaaggtggtctcactcctgaaggaagtcaacttctayagtggcatcctgctgttggcctgcatcagtgtggaccgttacctggccattgtccatgccacacgcacactgacccagaagcgtcacttggtcaagtttg

SEQ ID NO: 647 - DNA, 201 bp, Homo sapiens
attacagcccctgtatgctagaaactgagacactcaacaagtatgttgtgatcatcgcctatgccctagtgttcctgctgagcctgctgggaaactccctsgtgatgctggtcatcttatacagcagggtcggccgctccgtcactgatgtctacctgctgaacctggccttggccgacctactctttgccctgaccttgc

SEQ ID NO: 648 - DNA, 201 bp, Homo sapiens
tcatcttatacagcagggtcggccgctccgtcactgatgtctacctgctgaacctggccttggccgacctactctttgccctgaccttgcccatctgggcygcctccaaggtgaatggctggatttttggcacattcctgtgcaaggtggtctcactcctgaaggaagtcaacttctacagtggcatcctgctgttggcct

SEQ ID NO: 649 - DNA, 201 bp, Homo sapiens
gaagaggacatgtcaaatattacagatccacagatgtgggattttgatgatctaaatttcactggcatgccacctgcagatgaagattacagcccctgtakgctagaaactgagacactcaacaagtatgttgtgatcatcgcctatgccctagtgttcctgctgagcctgctgggaaactccctggtgatgctggtcatc

SEQ ID NO: 650 - DNA, 201 bp, Homo sapiens
cttgaggcacagaaactcctgttcatgcccatacccctggccaaggaagatccctttgtccacaagtaaaaggaaatgctcctccagggagtctcagcttmaccctgaggtgagcatcatcttctgggttaggccttgcctaggcatagccctgcctcaagctatgtgagctcaccagtccctccccaaatgctttccatg

SEQ ID NO: 651 - DNA, 201 bp, Homo sapiens
ctgggccgcctccaaggtgaatggctggatttttggcacattcctgtgcaaggtggtctcactcctgaaggaagtcaacttctacagtggcatcctgctgytggcctgcatcagtgtggaccgttacctggccattgtccatgccacacgcacactgacccagaagcgtcacttggtcaagtttgtttgtcttggctgctg

SEQ ID NO: 652 - DNA, 201 bp, Homo sapiens
tttaactcctgctagaacagtctcttgaggcacagaaactcctgttcatgcccatacccctggccaaggaagatccctttgtccacaagtaaaaggaaatsctcctccagggagtctcagcttcaccctgaggtgagcatcatcttctgggttaggccttgcctaggcatagccctgcctcaagctatgtgagctcaccag

SEQ ID NO: 653 - DNA, 192 bp, Homo sapiens
aagctatgtgagctcaccagtccctccccaaatgctttccatgagttgcagttttttcctagtctgttttccctccttggagacagggccctgtcggtttrttcactgtatgtccttggtgcctggagcctactaaatgctcaataaataatgatcacaggaatgaatgcatgctgaaaagaccactctttt

SEQ ID NO: 654 - DNA, 201 bp, Homo sapiens
acctatcctggttttactcttatcatttccatccataatggtcccactggcccggattttgcccaataagaaccgagacgaactgaatggcttttttaacraactcattaggaatgtgattgccttgcgggaccagcaagctgccgaagagaggcggagagacttcctccaaatggtcctggatgcccgacattctgcaag

SEQ ID NO: 655 - DNA, 201 bp, Homo sapiens
ggttttactcttatcatttccatccataatggtcccactggcccggattttgcccaataagaaccgagacgaactgaatggcttttttaacaaactcattrggaatgtgattgccttgcgggaccagcaagctgccgaagagaggcggagagacttcctccaaatggtcctggatgcccgacattctgcaagtcccatggg

SEQ ID NO: 656 - DNA, 201 bp, Homo sapiens
cctggatgcccgacattctgcaagtcccatgggcgtgcaagactttgacatcgtcagagacgttttctcctctactgggtgcaagccgaacccttcccggmaacaccagcccagccctatggccaggcctttgactgtggatgagattgtgggccaggccttcatcttcctcatcgctggctatgaaatcatcaccaacac

SEQ ID NO: 657 - DNA, 201 bp, Homo sapiens
gttctgcagcctcgaggaaggcctgccctatctggacatggtgattgcagagacgctgaggatgtacccgccagctttcagattcacacgggaggcagctsaggactgcgaggtgctggggcagcgcatccccgcaggcgctgtgctagagatggccgtgggtgccctgcaccatgaccctgagcactggccaagcccgga

SEQ ID NO: 658 - DNA, 201 bp, Homo sapiens
aggcgctgtgctagagatggccgtgggtgccctgcaccatgaccctgagcactggccaagcccggagaccttcaaccctgaaaggttcacggctgaggccmggcagcagcaccggcccttcacgtacctgcccttcggggccggcccacggagctgcctcggggtgcgtctagggctgcttgaggtcaagttgacactgct

SEQ ID NO: 659 - DNA, 201 bp, Homo sapiens
gacatcgtcagagacgttttctcctctactgggtgcaagccgaacccttcccggcaacaccagcccagccctatggccaggcctttgactgtggatgagaytgtgggccaggccttcatcttcctcatcgctggctatgaaatcatcaccaacacactttcttttgccacctacctactggccaccaaccctgactgccaa

SEQ ID NO: 660 - DNA, 201 bp, Homo sapiens
gccctatctggacatggtgattgcagagacgctgaggatgtacccgccagctttcagattcacacgggaggcagctcaggactgcgaggtgctggggcagygcatccccgcaggcgctgtgctagagatggccgtgggtgccctgcaccatgaccctgagcactggccaagcccggagaccttcaaccctgaaaggttcac

SEQ ID NO: 661 - DNA, 201 bp, Homo sapiens
gggagggcacccccaaattcaaagaaaaccctaagtgtggatgttcagaattttggaaaaatgtcactgaagtgattgaaagagtgcctggcatgcaaggrtaagaggttctttacataacatttcctaaatgcttaataaacgtttgttgcacttggttttgacattgccaatggggtttgaaccagtgctctctctaaa

SEQ ID NO: 662 - DNA, 201 bp, Homo sapiens
gacccaggtaccgctgcagctagaatccaaatctgccctaggtccaaaaaatggtgtctatatcaagatcgtatcccgctgacacagaaggctgccgggtsgggggagggcacccccaaattcaaagaaaaccctaagtgtggatgttcagaattttggaaaaatgtcactgaagtgattgaaagagtgcctggcatgcaa

SEQ ID NO: 663 - DNA, 201 bp, Homo sapiens
tgtttattgttatttctgagccagacatgatcaagcaggtgttggttgagaacttcagtaactttaccaacagaatggcgtcgggtttggagttcaagtcrgtagccgacagcgttctgtttttacgtgacaaaagatgggaagaggtcagaggtgccctgatgtctgctttcagtcctgaaaagctgaacgagatggttc

SEQ ID NO: 664 - DNA, 201 bp, Homo sapiens
ttctcctggctcatttaaaacgctatgcggaatctggggacgcatttgacatccagaggtgctactgcaattacaccacagatgtggttgccagcgtcgcstttggcaccccggtggactcctggcaggcccctgaggatccctttgtgaaacactgcaagcgtttcttcgaattctgcatccccagacctatcctggttt

SEQ ID NO: 665 - DNA, 201 bp, Homo sapiens
cagcctcctgtctcatctggaagaccaccactctggggtctcagaggaatgatggaagccttggggtttctaaaattggaagtgaatggccccatggtgayggtggccctgtcagtggctctcttggccctcctgaaatggtactccacatcagcattctcaagactggagaagttaggcctcagacatcccaagccttct

SEQ ID NO: 666 - DNA, 165 bp, Homo sapiens
ttcagaattttggaaaaatgtcactgaagtgattgaaagagtgcctggcatgcaaggataagaggttctttacataacatttcctaaatgcttaataaacrtttgttgcacttggttttgacattgccaatggggtttgaaccagtgctctctctaaatgaagaa

SEQ ID NO: 667 - DNA, 201 bp, Homo sapiens
cggctccgagtccagcgcagccgagccggtctgcagaggggcccccagaactttgtgtgtgtgtgtgcacgcgcgcgcgtgtgtgcccaggtgcgagggtkcgcgcgtgtgctggcggggagggaaccgacccgaaagagagccccacgctggcaaagtggctcgcccatctcacagccggttggcgctcgcggaggagac

SEQ ID NO: 668 - DNA, 201 bp, Homo sapiens
cacctacctactggccaccaaccctgactgccaagagaagcttctgagagaggtagacgtttttaaggagaaacacatggcccctgagttctgcagcctcraggaaggcctgccctatctggacatggtgattgcagagacgctgaggatgtacccgccagctttcagattcacacgggaggcagctcaggactgcgaggt

SEQ ID NO: 669 - DNA, 201 bp, Homo sapiens
ctcctgaaatggtactccacatcagcattctcaagactggagaagttaggcctcagacatcccaagccttctcctttcattggaaacttgacatttttccrccagggtttttgggaaagccaaatggagctcagaaagctgtatggacctctgtgtgggtactatcttggtcgtcggatgtttattgttatttctgagcca

SEQ ID NO: 670 - DNA, 201 bp, Homo sapiens
ggccaggcctttgactgtggatgagattgtgggccaggccttcatcttcctcatcgctggctatgaaatcatcaccaacacactttcttttgccacctacstactggccaccaaccctgactgccaagagaagcttctgagagaggtagacgtttttaaggagaaacacatggcccctgagttctgcagcctcgaggaagg

SEQ ID NO: 671 - DNA, 201 bp, Homo sapiens
ggacatggtgattgcagagacgctgaggatgtacccgccagctttcagattcacacgggaggcagctcaggactgcgaggtgctggggcagcgcatccccrcaggcgctgtgctagagatggccgtgggtgccctgcaccatgaccctgagcactggccaagcccggagaccttcaaccctgaaaggttcacggctgaggc

SEQ ID NO: 672 - DNA, 131 bp, Homo sapiens
gcctggacccggcgggcgcacggctccgagyccagcgcagccgagccggtctgcagaggggcccccagaactttgtgtgtgtgtgtgcacgcgcgcgcgtgtgtgcccaggtgcgagggtgcgcgcgtgtg

SEQ ID NO: 673 - DNA, 201 bp, Homo sapiens
tacgtgacaaaagatgggaagaggtcagaggtgccctgatgtctgctttcagtcctgaaaagctgaacgagatggttcccctcatcagccaagcctgcgamcttctcctggctcatttaaaacgctatgcggaatctggggacgcatttgacatccagaggtgctactgcaattacaccacagatgtggttgccagcgtcg

SEQ ID NO: 674 - DNA, 201 bp, Homo sapiens
ctactggccaccaaccctgactgccaagagaagcttctgagagaggtagacgtttttaaggagaaacacatggcccctgagttctgcagcctcgaggaagkcctgccctatctggacatggtgattgcagagacgctgaggatgtacccgccagctttcagattcacacgggaggcagctcaggactgcgaggtgctgggg

SEQ ID NO: 675 - DNA, 201 bp, Homo sapiens
ggtgattgcagagacgctgaggatgtacccgccagctttcagattcacacgggaggcagctcaggactgcgaggtgctggggcagcgcatccccgcaggcrctgtgctagagatggccgtgggtgccctgcaccatgaccctgagcactggccaagcccggagaccttcaaccctgaaaggttcacggctgaggcccggca

SEQ ID NO: 676 - DNA, 201 bp, Homo sapiens
tgagagaggtagacgtttttaaggagaaacacatggcccctgagttctgcagcctcgaggaaggcctgccctatctggacatggtgattgcagagacgctraggatgtacccgccagctttcagattcacacgggaggcagctcaggactgcgaggtgctggggcagcgcatccccgcaggcgctgtgctagagatggccg

SEQ ID NO: 677 - DNA, 201 bp, Homo sapiens
tgaggatgtacccgccagctttcagattcacacgggaggcagctcaggactgcgaggtgctggggcagcgcatccccgcaggcgctgtgctagagatggcygtgggtgccctgcaccatgaccctgagcactggccaagcccggagaccttcaaccctgaaaggttcacggctgaggcccggcagcagcaccggcccttca

SEQ ID NO: 678 - DNA, 201 bp, Homo sapiens
tgacaaaagatgggaagaggtcagaggtgccctgatgtctgctttcagtcctgaaaagctgaacgagatggttcccctcatcagccaagcctgcgaccttmtcctggctcatttaaaacgctatgcggaatctggggacgcatttgacatccagaggtgctactgcaattacaccacagatgtggttgccagcgtcgcctt

SEQ ID NO: 679 - DNA, 201 bp, Homo sapiens
gactgcgaggtgctggggcagcgcatccccgcaggcgctgtgctagagatggccgtgggtgccctgcaccatgaccctgagcactggccaagcccggagamcttcaaccctgaaaggttcacggctgaggcccggcagcagcaccggcccttcacgtacctgcccttcggggccggcccacggagctgcctcggggtgcgt

SEQ ID NO: 680 - DNA, 201 bp, Homo sapiens; identical to SEQ ID NO: 654

SEQ ID NO: 681 - DNA, 201 bp, Homo sapiens; identical to SEQ ID NO: 655

SEQ ID NO: 682 - DNA, 201 bp, Homo sapiens; identical to SEQ ID NO: 656

SEQ ID NO: 683 - DNA, 201 bp, Homo sapiens; identical to SEQ ID NO: 657

SEQ ID NO: 684 - DNA, 201 bp, Homo sapiens; identical to SEQ ID NO: 658

SEQ ID NO: 685 - DNA, 201 bp, Homo sapiens; identical to SEQ ID NO: 659

SEQ ID NO: 686 - DNA, 201 bp, Homo sapiens; identical to SEQ ID NO: 660

SEQ ID NO: 687 - DNA, 201 bp, Homo sapiens; identical to SEQ ID NO: 661

SEQ ID NO: 688 - DNA, 201 bp, Homo sapiens; identical to SEQ ID NO: 662

SEQ ID NO: 689 - DNA, 201 bp, Homo sapiens; identical to SEQ ID NO: 663

SEQ ID NO: 690 - DNA, 201 bp, Homo sapiens; identical to SEQ ID NO: 664

SEQ ID NO: 691 - DNA, 201 bp, Homo sapiens; identical to SEQ ID NO: 665

SEQ ID NO: 692 - DNA, 165 bp, Homo sapiens; identical to SEQ ID NO: 666

SEQ ID NO: 693 - DNA, 201 bp, Homo sapiens; identical to SEQ ID NO: 668

SEQ ID NO: 694 - DNA, 201 bp, Homo sapiens; identical to SEQ ID NO: 669

SEQ ID NO: 695 - DNA, 201 bp, Homo sapiens; identical to SEQ ID NO: 670

SEQ ID NO: 696 - DNA, 201 bp, Homo sapiens; identical to SEQ ID NO: 671

SEQ ID NO: 697 - DNA, 201 bp, Homo sapiens; identical to SEQ ID NO: 673

SEQ ID NO: 698 - DNA, 201 bp, Homo sapiens; identical to SEQ ID NO: 674

SEQ ID NO: 699 - DNA, 201 bp, Homo sapiens; identical to SEQ ID NO: 675

SEQ ID NO: 700 - DNA, 201 bp, Homo sapiens; identical to SEQ ID NO: 676

SEQ ID NO: 701 - DNA, 201 bp, Homo sapiens; identical to SEQ ID NO: 677

SEQ ID NO: 702 - DNA, 201 bp, Homo sapiens; identical to SEQ ID NO: 678

SEQ ID NO: 703 - DNA, 201 bp, Homo sapiens; identical to SEQ ID NO: 679

SEQ ID NO: 704 - DNA, 201 bp, Homo sapiens; identical to SEQ ID NO: 654

SEQ ID NO: 705 - DNA, 201 bp, Homo sapiens; identical to SEQ ID NO: 655

SEQ ID NO: 706 - DNA, 201 bp, Homo sapiens; identical to SEQ ID NO: 656

SEQ ID NO: 707 - DNA, 201 bp, Homo sapiens; identical to SEQ ID NO: 657

SEQ ID NO: 708 - DNA, 201 bp, Homo sapiens; identical to SEQ ID NO: 659

SEQ ID NO: 709 - DNA, 201 bp, Homo sapiens
gccctatctggacatggtgattgcagagacgctgaggatgtacccgccagctttcagattcacacgggaggcagctcaggactgcgaggtgctggggcagygcatccccgcaggcgctgtgctagagatggccgtgggtgccctgcaccatgaccctgagcactggccaagcccggagaccttcaaccctgaaaggtaccg

SEQ ID NO: 710 - DNA, 201 bp, Homo sapiens; identical to SEQ ID NO: 661

SEQ ID NO: 711 - DNA, 201 bp, Homo sapiens
ctgaaaggtaccgctgcagctagaatccaaatctgccctaggtccaaaaaatggtgtctatatcaagatcgtatcccgctgacacagaaggctgccgggtsgggggagggcacccccaaattcaaagaaaaccctaagtgtggatgttcagaattttggaaaaatgtcactgaagtgattgaaagagtgcctggcatgcaa

SEQ ID NO: 712 - DNA, 201 bp, Homo sapiens; identical to SEQ ID NO: 663

SEQ ID NO: 713 - DNA, 201 bp, Homo sapiens; identical to SEQ ID NO: 664

SEQ ID NO: 714 - DNA, 201 bp, Homo sapiens; identical to SEQ ID NO: 665

SEQ ID NO: 715 - DNA, 165 bp, Homo sapiens; identical to SEQ ID NO: 666

SEQ ID NO: 716 - DNA, 201 bp, Homo sapiens; identical to SEQ ID NO: 668

SEQ ID NO: 717 - DNA, 201 bp, Homo sapiens; identical to SEQ ID NO: 669

SEQ ID NO: 718 - DNA, 201 bp, Homo sapiens; identical to SEQ ID NO: 670

SEQ ID NO: 719 - DNA, 201 bp, Homo sapiens
ggacatggtgattgcagagacgctgaggatgtacccgccagctttcagattcacacgggaggcagctcaggactgcgaggtgctggggcagcgcatccccrcaggcgctgtgctagagatggccgtgggtgccctgcaccatgaccctgagcactggccaagcccggagaccttcaaccctgaaaggtaccgctgcagcta

SEQ ID NO: 720 - DNA, 201 bp, Homo sapiens; identical to SEQ ID NO: 673

SEQ ID NO: 721 - DNA, 201 bp, Homo sapiens; identical to SEQ ID NO: 674

SEQ ID NO: 722 - DNA, 201 bp, Homo sapiens
ggtgattgcagagacgctgaggatgtacccgccagctttcagattcacacgggaggcagctcaggactgcgaggtgctggggcagcgcatccccgcaggcrctgtgctagagatggccgtgggtgccctgcaccatgaccctgagcactggccaagcccggagaccttcaaccctgaaaggtaccgctgcagctagaatcc

SEQ ID NO: 723 - DNA, 201 bp, Homo sapiens; identical to SEQ ID NO: 676

SEQ ID NO: 724 - DNA, 201 bp, Homo sapiens
tgaggatgtacccgccagctttcagattcacacgggaggcagctcaggactgcgaggtgctggggcagcgcatccccgcaggcgctgtgctagagatggcygtgggtgccctgcaccatgaccctgagcactggccaagcccggagaccttcaaccctgaaaggtaccgctgcagctagaatccaaatctgccctaggtcc

SEQ ID NO: 725 - DNA, 201 bp, Homo sapiens; identical to SEQ ID NO: 678

SEQ ID NO: 726 - DNA, 201 bp, Homo sapiens
gactgcgaggtgctggggcagcgcatccccgcaggcgctgtgctagagatggccgtgggtgccctgcaccatgaccctgagcactggccaagcccggagamcttcaaccctgaaaggtaccgctgcagctagaatccaaatctgccctaggtccaaaaaatggtgtctatatcaagatcgtatcccgctgacacagaaggc

SEQ ID NO: 727 - DNA, 201 bp, Homo sapiens
tgaagtttccataattcctgggctccagaaagaagaaaaggcggccgtggagagacgaagacttcatgtgctgaaagctctgaagaagctaaggattgagsctgatgaggccccagttgttgctgtgctgggctcaggcggaggactgcgggctcacattgcctgccttggggtcctgagtgagatgaaagaacagggcct

SEQ ID NO: 728 - DNA, 201 bp, Homo sapiens
tacccgacaggagtgggacttggctaagagcctacagaaaaccatccaagcagcgaggtctgagaattactctctgaccgacttctgggcctacatggttrtctctaagcaaaccagagaactgccggagtctcatttgtccaatatgaagaagcccgtggaagaagggacactaccctacccgatatttgcagccattga

SEQ ID NO: 729 - DNA, 201 bp, Homo sapiens
ccccgcagtcttcacccgcggagattccggctgaaggagctgtccagcgactacaccgctaagcgcagggagcccaagcctccgcaccggattccggagcmcaagctccaccgcgcatgcgcacacgccccagacccaggctcaggcaagccgactgagaattttctgaccgcagtgcaccatgggaaggtaactctgaag

SEQ ID NO: 730 - DNA, 201 bp, Homo sapiens
ggacttggctaagagcctacagaaaaccatccaagcagcgaggtctgagaattactctctgaccgacttctgggcctacatggttatctctaagcaaaccrgagaactgccggagtctcatttgtccaatatgaagaagcccgtggaagaagggacactaccctacccgatatttgcagccattgacaatgacctgcaacc

SEQ ID NO: 731 - DNA, 201 bp, Homo sapiens
aatgatggtgacatggaagctctcgaggctgacctgaaacatcgatttacccgacaggagtgggacttggctaagagcctacagaaaaccatccaagcagygaggtctgagaattactctctgaccgacttctgggcctacatggttatctctaagcaaaccagagaactgccggagtctcatttgtccaatatgaagaag

SEQ ID NO: 732 - DNA, 201 bp, Homo sapiens
atttacccgacaggagtgggacttggctaagagcctacagaaaaccatccaagcagcgaggtctgagaattactctctgaccgacttctgggcctacatgkttatctctaagcaaaccagagaactgccggagtctcatttgtccaatatgaagaagcccgtggaagaagggacactaccctacccgatatttgcagccat

SEQ ID NO: 733 - DNA, 201 bp, Homo sapiens
aagagcctacagaaaaccatccaagcagcgaggtctgagaattactctctgaccgacttctgggcctacatggttatctctaagcaaaccagagaactgcyggagtctcatttgtccaatatgaagaagcccgtggaagaagggacactaccctacccgatatttgcagccattgacaatgacctgcaaccttcctggcag

SEQ ID NO: 734 - DNA, 188 bp, Homo sapiens
tctgggcctacatggttatctctaagcaaaccagagaactgccggagtctcatttgtccaatatgaagaagcccgtggaagaagggacactaccctacccratatttgcagccattgacaatgacctgcaaccttcctggcaggaggcaagagcaccaggtaagcaaacatttagagggagggagagg

SEQ ID NO: 735 - DNA, 201 bp, Homo sapiens; identical to SEQ ID NO: 728

SEQ ID NO: 736 - DNA, 201 bp, Homo sapiens
ccccgcagtcttcacccgcggagattccggctgaaggagctgtccagcgactacaccgctaagcgcagggagcccaagcctccgcaccggattccggagcmcaagctccaccgcgcatgcgcacacgccccagacccaggctcagagtttcactcttgttgcccagactggagtgcaatggcatgatctctgctcactggc

SEQ ID NO: 737 - DNA, 201 bp, Homo sapiens; identical to SEQ ID NO: 730

SEQ ID NO: 738 - DNA, 201 bp, Homo sapiens
tccccaagtagaagaggctgagctggatttgtggtccaaggcccccgccagctgctacatcctgaaaggagaaactggaccagtggtgatgcattttcccytgttcaacatagatgcctgtggaggtgatattgaggcatggagtgacacatacgacacattcaagcttgctgacacctacactctagatgtggtggtgct

SEQ ID NO: 739 - DNA, 201 bp, Homo sapiens
gttggtctactagggccctgaagtccacctggccttcctgttcttcactcccttcagccacacgcttcatggccttgagttcaccttggctgtcctaacarggccaatcaccagtgaccagctagactgtgattttgatagcgtcattcagaagaaggcgtccaaggagctgaaggtggtgaaatttgtcctgcaggtccc

SEQ ID NO: 740 - DNA, 201 bp, Homo sapiens
aaggcgtccaaggagctgaaggtggtgaaatttgtcctgcaggtccctcgggagatcctggagctggagcatgagtgtctgacaatcagaagcatcatgtycaatgtccagatggccagaatgaatgtgatagttcagaccaatgccttccactgctcctttatgactgcacttctagccagtagctctgcacaagttagc

SEQ ID NO: 741 - DNA, 201 bp, Homo sapiens; identical to SEQ ID NO: 731

SEQ ID NO: 742 - DNA, 201 bp, Homo sapiens; identical to SEQ ID NO: 732

SEQ ID NO: 743 - DNA, 201 bp, Homo sapiens; identical to SEQ ID NO: 733

SEQ ID NO: 744 - DNA, 201 bp, Homo sapiens
tctgggcctacatggttatctctaagcaaaccagagaactgccggagtctcatttgtccaatatgaagaagcccgtggaagaagggacactaccctacccratatttgcagccattgacaatgacctgcaaccttcctggcaggaggcaagagcaccagagacctggttcgagttcacccctcaccacgctggcttctctg

SEQ ID NO: 745 - DNA, 201 bp, Homo sapiens
ggccaatcaccagtgaccagctagactgtgattttgatagcgtcattcagaagaaggcgtccaaggagctgaaggtggtgaaatttgtcctgcaggtcccycgggagatcctggagctggagcatgagtgtctgacaatcagaagcatcatgtccaatgtccagatggccagaatgaatgtgatagttcagaccaatgcct

SEQ ID NO: 746 - DNA, 201 bp, Homo sapiens
ggctctactacccgaaggatagtgcccgaagttgctgcttggcatagatgagcctcagcttccagggcactgtgggcctgttggtctactagggccctgawgtccacctggccttcctgttcttcactcccttcagccacacgcttcatggccttgagttcaccttggctgtcctaacagggccaatcaccagtgaccagc

SEQ ID NO: 747 - DNA, 201 bp, Homo sapiens
gattactgaggctgcaagaaagttcacaaggggaacatcctcccccagaagatgaaggcggtgagcctgaacacacctggctgactgagatgctcgagaaytggaccaggacctccctggaaaagcaggagcagccccatgaggaccccgaaaggaaaggctcactcagtaacttgatggattttgtgaagaaaacaggca

SEQ ID NO: 748 - DNA, 201 bp, Homo sapiens
cacacgcttcatggccttgagttcaccttggctgtcctaacagggccaatcaccagtgaccagctagactgtgattttgatagcgtcattcagaagaaggygtccaaggagctgaaggtggtgaaatttgtcctgcaggtccctcgggagatcctggagctggagcatgagtgtctgacaatcagaagcatcatgtccaat

SEQ ID NO: 749 - DNA, 201 bp, Homo sapiens
gccatcaacactcccttcccactcgtgctgcccccgacgcgggaggttcacctcatcctctccttcgacttcagtgccggagatcctttcgagaccatccrggctaccactgactactgccgccgccacaagatcccctttccccaagtagaagaggctgagctggatttgtggtccaaggcccccgccagctgctacatc

SEQ ID NO: 750 - DNA, 201 bp, Homo sapiens
cccgatatttgcagccattgacaatgacctgcaaccttcctggcaggaggcaagagcaccagagacctggttcgagttcacccctcaccacgctggcttcyctgcactgggggcctttgtttccataacccacttcggaagcaaattcaagaagggaagactggtcagaactcaccctgagagagacctgactttcctgag

SEQ ID NO: 751 - DNA, 201 bp, Homo sapiens
gttgatgaacgtggccgggctctactacccgaaggatagtgcccgaagttgctgcttggcatagatgagcctcagcttccagggcactgtgggcctgttgrtctactagggccctgaagtccacctggccttcctgttcttcactcccttcagccacacgcttcatggccttgagttcaccttggctgtcctaacagggcc

SEQ ID NO: 752 - DNA, 201 bp, Homo sapiens
gcagccccatgaggaccccgaaaggaaaggctcactcagtaacttgatggattttgtgaagaaaacaggcatttgcgcttcaaagtgggaatgggggaccmctcacaacttcctgtacaaacacgagtttgactcttttcatcagcaagaggaaccattcccagaggtactgtcttagtctgctcaggctgctgtgacaaa

SEQ ID NO: 753 - DNA, 201 bp, Homo sapiens; identical to SEQ ID NO: 727

SEQ ID NO: 754 - DNA, 201 bp, Homo sapiens
ccttcccactcgtgctgcccccgacgcgggaggttcacctcatcctctccttcgacttcagtgccggagatcctttcgagaccatccgggctaccactgaytactgccgccgccacaagatcccctttccccaagtagaagaggctgagctggatttgtggtccaaggcccccgccagctgctacatcctgaaaggagaaa

SEQ ID NO: 755 - DNA, 201 bp, Homo sapiens
tgagttcaccttggctgtcctaacagggccaatcaccagtgaccagctagactgtgattttgatagcgtcattcagaagaaggcgtccaaggagctgaagrtggtgaaatttgtcctgcaggtccctcgggagatcctggagctggagcatgagtgtctgacaatcagaagcatcatgtccaatgtccagatggccagaat

SEQ ID NO: 756 - DNA, 201 bp, Homo sapiens; identical to SEQ ID NO: 728

SEQ ID NO: 757 - DNA, 201 bp, Homo sapiens; identical to SEQ ID NO: 736

SEQ ID NO: 758 - DNA, 201 bp, Homo sapiens; identical to SEQ ID NO: 730

SEQ ID NO: 759 - DNA, 201 bp, Homo sapiens; identical to SEQ ID NO: 738

SEQ ID NO: 760 - DNA, 201 bp, Homo sapiens; identical to SEQ ID NO: 731

SEQ ID NO: 761 - DNA, 201 bp, Homo sapiens; identical to SEQ ID NO: 740

SEQ ID NO: 762 - DNA, 201 bp, Homo sapiens; identical to SEQ ID NO: 739

SEQ ID NO: 763 - DNA, 201 bp, Homo sapiens; identical to SEQ ID NO: 744

SEQ ID NO: 764 - DNA, 201 bp, Homo sapiens; identical to SEQ ID NO: 733

SEQ ID NO: 765 - DNA, 201 bp, Homo sapiens; identical to SEQ ID NO: 732

SEQ ID NO: 766 - DNA, 201 bp, Homo sapiens; identical to SEQ ID NO: 745

SEQ ID NO: 767 - DNA, 201 bp, Homo sapiens; identical to SEQ ID NO: 746

SEQ ID NO: 768 - DNA, 201 bp, Homo sapiens; identical to SEQ ID NO: 749

SEQ ID NO: 769 - DNA, 201 bp, Homo sapiens; identical to SEQ ID NO: 747

SEQ ID NO: 770 - DNA, 201 bp, Homo sapiens; identical to SEQ ID NO: 748

SEQ ID NO: 771 - DNA, 201 bp, Homo sapiens; identical to SEQ ID NO: 750

SEQ ID NO: 772 - DNA, 201 bp, Homo sapiens; identical to SEQ ID NO: 751

SEQ ID NO: 773 - DNA, 201 bp, Homo sapiens
gcagccccatgaggaccccgaaaggaaaggctcactcagtaacttgatggattttgtgaagaaaacaggcatttgcgcttcaaagtgggaatgggggaccmctcacaacttcctgtacaaacacggtggcatccgggacaagataatgagcagccggaagcacctccacctggtggatgctggtttagccatcaacactcc

SEQ ID NO: 774 - DNA, 201 bp, Homo sapiens; identical to SEQ ID NO: 727

SEQ ID NO: 775 - DNA, 201 bp, Homo sapiens; identical to SEQ ID NO: 755

SEQ ID NO: 776 - DNA, 201 bp, Homo sapiens; identical to SEQ ID NO: 754

SEQ ID NO: 777 - DNA, 201 bp, Homo sapiens; identical to SEQ ID NO: 728

SEQ ID NO: 778 - DNA, 201 bp, Homo sapiens
ccccgcagtcttcacccgcggagattccggctgaaggagctgtccagcgactacaccgctaagcgcagggagcccaagcctccgcaccggattccggagcmcaagctccaccgcgcatgcgcacacgccccagacccaggctcaggaggactgagaattttctgaccgcagtgcaccatgggaagctctgaagtttccata

SEQ ID NO: 779 - DNA, 201 bp, Homo sapiens; identical to SEQ ID NO: 730

SEQ ID NO: 780 - DNA, 201 bp, Homo sapiens; identical to SEQ ID NO: 738

SEQ ID NO: 781 - DNA, 201 bp, Homo sapiens; identical to SEQ ID NO: 731

SEQ ID NO: 782 - DNA, 201 bp, Homo sapiens; identical to SEQ ID NO: 740

SEQ ID NO: 783 - DNA, 201 bp, Homo sapiens; identical to SEQ ID NO: 739

SEQ ID NO: 784 - DNA, 201 bp, Homo sapiens; identical to SEQ ID NO: 744

SEQ ID NO: 785 - DNA, 201 bp, Homo sapiens; identical to SEQ ID NO: 733

SEQ ID NO: 786 - DNA, 201 bp, Homo sapiens; identical to SEQ ID NO: 732

SEQ ID NO: 787 - DNA, 201 bp, Homo sapiens; identical to SEQ ID NO: 745

SEQ ID NO: 788 - DNA, 201 bp, Homo sapiens; identical to SEQ ID NO: 746

SEQ ID NO: 789 - DNA, 201 bp, Homo sapiens; identical to SEQ ID NO: 749

SEQ ID NO: 790 - DNA, 201 bp, Homo sapiens; identical to SEQ ID NO: 747

SEQ ID NO: 791 - DNA, 201 bp, Homo sapiens; identical to SEQ ID NO: 748

SEQ ID NO: 792 - DNA, 201 bp, Homo sapiens; identical to SEQ ID NO: 750

SEQ ID NO: 793 - DNA, 201 bp, Homo sapiens; identical to SEQ ID NO: 751

SEQ ID NO: 794 - DNA, 201 bp, Homo sapiens; identical to SEQ ID NO: 773

SEQ ID NO: 795 - DNA, 201 bp, Homo sapiens; identical to SEQ ID NO: 727

SEQ ID NO: 796 - DNA, 201 bp, Homo sapiens; identical to SEQ ID NO: 755

SEQ ID NO: 797 - DNA, 201 bp, Homo sapiens; identical to SEQ ID NO: 754

SEQ ID NO: 798 - DNA, 201 bp, Homo sapiens
gctagtgccctacttggagaagagaataaaggcttctattacatcatgaaagagcttccacaggaaaggctgttaattgctgatgtggcaatttcagctastgaattcatgtttgaagaaaccaggaactatgttaaacaaagaaaagcttttggcaaaacagttgctcacctacagacagtgcaacataaattagcagaa

SEQ ID NO: 799 - DNA, 201 bp, Homo sapiens
ttttctgaatcttgcctaggtgtttcatttatctctaaaattctaaaaagcataaatcattcaaatcttcaaaccaaggcagaaataattttatgtcgctmtagtataaaaacattaataagatagcacattgacttttaaagggaaaagtaaatataacttagcatgtaaactcatttcggctaccatttgctccaaatt

SEQ ID NO: 800 - DNA, 201 bp, Homo sapiens
cttctccgagggtccctacgcgtcctgggcggccaccgtgcgccgcgccagctgcccgccgcgcgatgttctcattccggaggggaagaacgtctagaaaytccttctgctaaaaaattaacagatataggaattcgaagaatcttttctccagagcatgacattttccggaaaagtgtaaggaagtttttccaagaagaa

SEQ ID NO: 801 - DNA, 201 bp, Homo sapiens
cttttttgggaggacaccacaggtggacgcctcagctgatcgtcctccctcccggggaccctgccccgagtcgccgagtagccgcagagtcgcctccgtcsccccgccgcccctgtgtttcggacatggccgcacgccttctccgagggtccctacgcgtcctgggcggccaccgtgcgccgcgccagctgcccgccgcgc

SEQ ID NO: 802 - DNA, 201 bp, Homo sapiens
aatttcagctagtgaattcatgtttgaagaaaccaggaactatgttaaacaaagaaaagcttttggcaaaacagttgctcacctacagacagtgcaacatmaattagcagaattaaaaacacatatatgtgtaacccgagcatttgtggacaactgtctccagctgcatgaagcgaaacgtttggactccgccactgcttg

SEQ ID NO: 803 - DNA, 201 bp, Homo sapiens
cgctccacagtcatccggctgaagaagacctgttggactggatcttctcgggttttctttcagatattgttttgtatttacccatgaagacattgtttttyggactctgcaaataggacatttcaaagatgagtgaaaaaaaattggaaacaactgcacagcagcggaaatgtcctgaatggatgaatgtgcagaataaaa

SEQ ID NO: 804 - DNA, 201 bp, Homo sapiens
gaaaaaaaattggaaacaactgcacagcagcggaaatgtcctgaatggatgaatgtgcagaataaaagatgtgctgtagaagaaagaaaggcatgtgttcrgaagagtgtttttgaagatgacctccccttcttagaattcactggatccattgtgtatagttacgatgctagtgattgctctttcctgtcagaagatatt

SEQ ID NO: 805 - DNA, 201 bp, Homo sapiens
tcaaagatgagtgaaaaaaaattggaaacaactgcacagcagcggaaatgtcctgaatggatgaatgtgcagaataaaagatgtgctgtagaagaaagaarggcatgtgttcggaagagtgtttttgaagatgacctccccttcttagaattcactggatccattgtgtatagttacgatgctagtgattgctctttcctg

SEQ ID NO: 806 - DNA, 201 bp, Homo sapiens
taggaattgaaggagatcagtggaaacttctacgtgactttgatatcaaattgaagaattttgtggagttgacagatgttgccaataaaaagctgaaatgyacagagacctggagccttaacagtctggttaaacacctcttaggtaaacagctcctgaaagacaagtctatccgctgtagcaattggagtaaatttcctc

SEQ ID NO: 807 - DNA, 201 bp, Homo sapiens
tagctaaacatgatggagaagatgtacttggaaataaagtggaacgaaaagaagatggatttgaagatggagtagaagacaacaaattgaaagagaatatrgaaagagcttgtttgatgtcgttagatattacagaacatgaactccaaattttggaacagcagtctcaggaagaatatcttagtgatattgcttataaat

SEQ ID NO: 808 - DNA, 201 bp, Homo sapiens
ttgtacgttgcttaaatctgagaaatcctcagatcacctgtactggttttgatcgaccaaacctgtatttagaagttaggcgaaaaacagggaatatcctkcaggatctgcagccatttcttgtcaaaacaagttcccactgggaatttgaaggtccaacaatcatctactgtccttctagaaaaatgacacaacaagtta

SEQ ID NO: 809 - DNA, 201 bp, Homo sapiens
gcgcccttacgaaaaagggtagaaattggcttcataaagctaatacagaatctcagagcctcatccttcaagctaatgaagaattgtgtccaaagaagttkcttctgcctagttcgaaaactgtatcttcgggcaccaaagagcattgttataatcaagtaccagttgaattaagtacagagaagaagtctaacttggaga

SEQ ID NO: 810 - DNA, 201 bp, Homo sapiens
ttgtcaaaacaagttcccactgggaatttgaaggtccaacaatcatctactgtccttctagaaaaatgacacaacaagttacaggtgaacttaggaaactkaatctatcctgtggaacataccatgcgggcatgagttttagcacaaggaaagacattcatcataggtttgtaagagatgaaattcagtgtgtcatagcta

SEQ ID NO: 811 - DNA, 201 bp, Homo sapiens
atcaatactgagacttcatctgcagagagaaagagacgattacctgtgtggtttgccaaaggaagtgataccagcaagaaattaatggacaaaacgaaaasgggaggtctttttagttaagctggcaattaccagaacaattatgtttcttgctgtattataagaggatagctatattttatttctgaagagtaaggagta

SEQ ID NO: 812 - DNA, 201 bp, Homo sapiens
atcatttagctaaacatgatggagaagatgtacttggaaataaagtggaacgaaaagaagatggatttgaagatggagtagaagacaacaaattgaaagaraatatggaaagagcttgtttgatgtcgttagatattacagaacatgaactccaaattttggaacagcagtctcaggaagaatatcttagtgatattgctt

SEQ ID NO: 813 - DNA, 201 bp, Homo sapiens
atttgacatggagtggccaccattatacaatagagggaaacttggcaaagttgcactaattcagttgtgtgtttctgagagcaaatgttacttgttccacrtttcttccatgtcagtttttccccagggattaaaaatgttgcttgaaaataaagcagttaaaaaggcaggtgtaggaattgaaggagatcagtggaaact

SEQ ID NO: 814 - DNA, 201 bp, Homo sapiens
cctaatcagaatgttagttcctgaaaacattgacacgtaccttatccacatggcaattgagatccttaaacatggtcctgacagcggacttcaaccttcaygtgatgtcaacaaaaggagatgttttcccggttctgaagagatctgttcaagttctaagagaagcaaggaagaagtaggcatcaatactgagacttcatc

SEQ ID NO: 815 - DNA, 201 bp, Homo sapiens
tcaacctcttttgtgtatcccaccagacttttttatattcatttgtttttaggtaaaatataaaagtctcgtatattcccatttttctgcattgcattachagaaggtagtggcgcctattaaatatgtgatatgttgttgtccagccatggcttctgcatttgcatgcttttgtgtgtgcatctgcaataccctgtgaat

SEQ ID NO: 816 - DNA, 201 bp, Homo sapiens
atatgagtaaaattagcctaatcagaatgttagttcctgaaaacattgacacgtaccttatccacatggcaattgagatccttaaacatggtcctgacagyggacttcaaccttcatgtgatgtcaacaaaaggagatgttttcccggttctgaagagatctgttcaagttctaagagaagcaaggaagaagtaggcatca

SEQ ID NO: 817 - DNA, 201 bp, Homo sapiens
aaaatgaaaataaaaatcattcatagttttactagtagctaatcacagtcaacctcttttgtgtatcccaccagacttttttatattcatttgtttttagktaaaatataaaagtctcgtatattcccatttttctgcattgcattaccagaaggtagtggcgcctattaaatatgtgatatgttgttgtccagccatggc

SEQ ID NO: 818 - DNA, 201 bp, Homo sapiens
aagggtagaaattggcttcataaagctaatacagaatctcagagcctcatccttcaagctaatgaagaattgtgtccaaagaagttgcttctgcctagttygaaaactgtatcttcgggcaccaaagagcattgttataatcaagtaccagttgaattaagtacagagaagaagtctaacttggagaagttatattcttat

SEQ ID NO: 819 - DNA, 201 bp, Homo sapiens; identical to SEQ ID NO: 803

SEQ ID NO: 820 - DNA, 201 bp, Homo sapiens; identical to SEQ ID NO: 804

SEQ ID NO: 821 - DNA, 201 bp, Homo sapiens; identical to SEQ ID NO: 805

SEQ ID NO: 822 - DNA, 201 bp, Homo sapiens; identical to SEQ ID NO: 806

SEQ ID NO: 823 - DNA, 201 bp, Homo sapiens; identical to SEQ ID NO: 807

SEQ ID NO: 824 - DNA, 201 bp, Homo sapiens; identical to SEQ ID NO: 808

SEQ ID NO: 825 - DNA, 201 bp, Homo sapiens; identical to SEQ ID NO: 809

SEQ ID NO: 826 - DNA, 201 bp, Homo sapiens; identical to SEQ ID NO: 810

SEQ ID NO: 827 - DNA, 201 bp, Homo sapiens; identical to SEQ ID NO: 811

SEQ ID NO: 828 - DNA, 201 bp, Homo sapiens; identical to SEQ ID NO: 812

SEQ ID NO: 829 - DNA, 201 bp, Homo sapiens; identical to SEQ ID NO: 813

SEQ ID NO: 830 - DNA, 201 bp, Homo sapiens; identical to SEQ ID NO: 814

SEQ ID NO: 831 - DNA, 201 bp, Homo sapiens; identical to SEQ ID NO: 815

SEQ ID NO: 832 - DNA, 201 bp, Homo sapiens; identical to SEQ ID NO: 816

SEQ ID NO: 833 - DNA, 201 bp, Homo sapiens; identical to SEQ ID NO: 817

SEQ ID NO: 834 - DNA, 201 bp, Homo sapiens; identical to SEQ ID NO: 818

SEQ ID NO: 835 - DNA, 201 bp, Homo sapiens; identical to SEQ ID NO: 803

SEQ ID NO: 836 - DNA, 201 bp, Homo sapiens; identical to SEQ ID NO: 804

SEQ ID NO: 837 - DNA, 201 bp, Homo sapiens; identical to SEQ ID NO: 805

SEQ ID NO: 838 - DNA, 201 bp, Homo sapiens; identical to SEQ ID NO: 806

SEQ ID NO: 839 - DNA, 201 bp, Homo sapiens; identical to SEQ ID NO: 807

SEQ ID NO: 840 - DNA, 201 bp, Homo sapiens; identical to SEQ ID NO: 808

SEQ ID NO: 841 - DNA, 201 bp, Homo sapiens; identical to SEQ ID NO: 809

SEQ ID NO: 842 - DNA, 201 bp, Homo sapiens; identical to SEQ ID NO: 810

SEQ ID NO: 843 - DNA, 201 bp, Homo sapiens; identical to SEQ ID NO: 811

SEQ ID NO: 844 - DNA, 201 bp, Homo sapiens; identical to SEQ ID NO: 812

SEQ ID NO: 845 - DNA, 201 bp, Homo sapiens; identical to SEQ ID NO: 813

SEQ ID NO: 846 - DNA, 201 bp, Homo sapiens; identical to SEQ ID NO: 814

SEQ ID NO: 847 - DNA, 201 bp, Homo sapiens; identical to SEQ ID NO: 815

SEQ ID NO: 848 - DNA, 201 bp, Homo sapiens; identical to SEQ ID NO: 816

SEQ ID NO: 849 - DNA, 201 bp, Homo sapiens; identical to SEQ ID NO: 817

SEQ ID NO: 850 - DNA, 201 bp, Homo sapiens; identical to SEQ ID NO: 818

SEQ ID NO: 851 - DNA, 201 bp, Homo sapiens; identical to SEQ ID NO: 804

SEQ ID NO: 852 - DNA, 201 bp, Homo sapiens; identical to SEQ ID NO: 807

SEQ ID NO: 853 - DNA, 201 bp, Homo sapiens; identical to SEQ ID NO: 810

SEQ ID NO: 854 - DNA, 201 bp, Homo sapiens; identical to SEQ ID NO: 811

SEQ ID NO: 855 - DNA, 201 bp, Homo sapiens; identical to SEQ ID NO: 812

SEQ ID NO: 856 - DNA, 201 bp, Homo sapiens; identical to SEQ ID NO: 813

SEQ ID NO: 857 - DNA, 201 bp, Homo sapiens; identical to SEQ ID NO: 803

SEQ ID NO: 858 - DNA, 201 bp, Homo sapiens; identical to SEQ ID NO: 805

SEQ ID NO: 859 - DNA, 201 bp, Homo sapiens; identical to SEQ ID NO: 806

SEQ ID NO: 860 - DNA, 201 bp, Homo sapiens; identical to SEQ ID NO: 808

SEQ ID NO: 861 - DNA, 201 bp, Homo sapiens; identical to SEQ ID NO: 809

SEQ ID NO: 862 - DNA, 201 bp, Homo sapiens; identical to SEQ ID NO: 814

SEQ ID NO: 863 - DNA, 201 bp, Homo sapiens; identical to SEQ ID NO: 816

SEQ ID NO: 864 - DNA, 201 bp, Homo sapiens
aagggtagaaattggcttcataaagctaatacagaatctcagagcctcatccttcaagctaatgaagaattgtgtccaaagaagtttcttctgcctagttygaaaactgtatcttcgggcaccaaagagcattgttataatcaagtaccagttgaattaagtacagagaagaagtctaacttggagaagttatattcttat

SEQ ID NO: 865 - DNA, 201 bp, Homo sapiens
gcaatttttacaacctgagttcaagtcaaattctgagcctggggggtcctcatctgcaaagcatggagagtggcatcttctttgcatcctaaggacgaaaracacagtgcactcagagctgctgaggacaatgtctggctgaagcccgctttcagcacgccgtaaccaggggctgacaatgcgaggtcgcaactgagatct

SEQ ID NO: 866 - DNA, 201 bp, Homo sapiens
tttcttaagattatctatggatggttctccaactaggattgcgtatgggacacaagggagctctggttactctttgagattgtgtaacactggggacaackctgtctgcacaacaaaaacaagcacacgcattgttggaggaacaaactcttcttggggagagtggccctggcaggtgagcctgcaggtgaagctgacagc

SEQ ID NO: 867 - DNA, 201 bp, Homo sapiens
accgctataaaggtgctgagtaacgtggaatctggattctcactgaagccctgtgccctttcagaaattggttgccacatgaacatcttccagcatcttgmgttctcagatgtggatgttgccagggttctcactccagatgcttttgtgtgtcggaccatctgcacctatcaccccaactgcctcttctttacattctat

SEQ ID NO: 868 - DNA, 201 bp, Homo sapiens
cgtttggtgggcatcaccagctggggtgaaggctgtgcccgcagggagcaacctggtgtctacaccaaagtcgctgagtacatggactggattttagagamaacacagagcagtgatggaaaagctcagatgcagtcaccagcatgagaagcagtccagagtctaggcaatttttacaacctgagttcaagtcaaattctg

SEQ ID NO: 869 - DNA, 201 bp, Homo sapiens
tggatatagccttttaacctgcaaaagaactttacctgaaccctgccattctaaaatttacccgggagttgactttggaggagaagaattgaatgtgactkttgttaaaggagtgaatgtttgccaagagacttgcacaaagatgattcgctgtcagtttttcacttattctttactcccagaagactgtaaggaagagaa

SEQ ID NO: 870 - DNA, 201 bp, Homo sapiens
gagaaaggtgaaatccaaaatattctacaaaaggtaaatattcctttggtaacaaatgaagaatgccagaaaagatatcaagattataaaataacccaacrgatggtctgtgctggctataaagaagggggaaaagatgcttgtaagggagattcaggtggtcccttagtttgcaaacacaacggaatgtggcgtttggtg

SEQ ID NO: 871 - DNA, 201 bp, Homo sapiens
tttgagattgtgtaacactggggacaactctgtctgcacaacaaaaacaagcacacgcattgttggaggaacaaactcttcttggggagagtggccctggyaggtgagcctgcaggtgaagctgacagctcagaggcacctgtgtggagggtcactcataggacaccagtgggtcctcactgctgcccactgctttgatgg

SEQ ID NO: 872 - DNA, 201 bp, Homo sapiens
attataaaataacccaacggatggtctgtgctggctataaagaagggggaaaagatgcttgtaagggagattcaggtggtcccttagtttgcaaacacaayggaatgtggcgtttggtgggcatcaccagctggggtgaaggctgtgcccgcagggagcaacctggtgtctacaccaaagtcgctgagtacatggactgga

SEQ ID NO: 873 - DNA, 201 bp, Homo sapiens
agtacagtcccggaggaacacctaccgctataaaggtgctgagtaacgtggaatctggattctcactgaagccctgtgccctttcagaaattggttgccamatgaacatcttccagcatcttgcgttctcagatgtggatgttgccagggttctcactccagatgcttttgtgtgtcggaccatctgcacctatcacccca

SEQ ID NO: 874 - DNA, 201 bp, Homo sapiens
gcttgccatcgagacatttataaaggagttgatatgagaggagtcaattttaatgtgtctaaggttagcagtgttgaagaatgccaaaaaaggtgcaccartaacattcgctgccagtttttttcatatgccacgcaaacatttcacaaggcagagtaccggaacaattgcctattaaagtacagtcccggaggaacacct

SEQ ID NO: 875 - DNA, 201 bp, Homo sapiens; identical to SEQ ID NO: 865

SEQ ID NO: 876 - DNA, 201 bp, Homo sapiens; identical to SEQ ID NO: 866

SEQ ID NO: 877 - DNA, 201 bp, Homo sapiens; identical to SEQ ID NO: 867

SEQ ID NO: 878 - DNA, 201 bp, Homo sapiens; identical to SEQ ID NO: 868

SEQ ID NO: 879 - DNA, 201 bp, Homo sapiens; identical to SEQ ID NO: 869

SEQ ID NO: 880 - DNA, 201 bp, Homo sapiens; identical to SEQ ID NO: 870

SEQ ID NO: 881 - DNA, 201 bp, Homo sapiens; identical to SEQ ID NO: 871

SEQ ID NO: 882 - DNA, 201 bp, Homo sapiens; identical to SEQ ID NO: 872

SEQ ID NO: 883 - DNA, 201 bp, Homo sapiens; identical to SEQ ID NO: 873

SEQ ID NO: 884 - DNA, 201 bp, Homo sapiens; identical to SEQ ID NO: 874

SEQ ID NO: 885 - DNA, 201 bp, Homo sapiens
tcactctgtagctgggtccaggcagaggggacatgggccaggaggatttattccaggctgtaagatgcccaagtgcagggcagctggagaagcccatgccragagagcaggcagtgcccacagtcctcctttacagggtgtctactggatctcatgtcaaagcaccaagatgccaggtggcttgatgatgcctggggagcc

SEQ ID NO: 886 - DNA, 201 bp, Homo sapiens
caggacttcacttggtcccagcactactccgggggccacaccatgaccaacaagttcactgttggcaaggaaagcaacatacagacaatggggggcaagaygttcaaggccactgtgcagatggagggcgggaagctggtggtgaatttccccaactatcaccagacctcagagatcgtgggtgacaagctggtggaggtc

SEQ ID NO: 887 - DNA, 201 bp, Homo sapiens
gaagtggggtgacttaggggctgagcctcagcaactgggagagtttataagctgggatagcagacccctcagcaccacccattctcctcatccctctgctmtctggcctccagcctcccagcagcatggctttcaccggcaagttcgagatggagagtgagaagaattatgatgagttcatgaagctccttgggatctcca

SEQ ID NO: 888 - DNA, 201 bp, Homo sapiens
gggctaggacaagagccctcgaccctggggccaacgccctgcgtccttggttcccccagaggatcagtgcgcgatgacttggggacaaaggagatgatggrggctagcagtctgacggcctggatatctgtccccttctccaggaccctgaaagacagccttgagcaagacctcaacaatatgaacaagttcctggaaaag

SEQ ID NO: 889 - DNA, 201 bp, Homo sapiens
ggatcaatcgggaggacgcccgctgcagtccccagaatcaaaggatgatgtggcgcatctatgtttctttggagagtgttgtaggtctggatttgtatggscaatgtgtttgtgcttcgtgcgtgagttgttactggccagggctaggacaagagccctcgaccctggggccaacgccctgcgtccttggttcccccagag

SEQ ID NO: 890 - DNA, 201 bp, Homo sapiens
cagtccttgaaagtggcctgttgggtggagggtggaaggtcctgtgcaggacagggaggccaccaaaggggctgctgtctcctgcatatccagcctcctgygactccccaatctggatgcattacattcaccaggctttgcaaacccagcctcccagtgctcatttgggaatgctcatgagttactccattcaagggtgag

SEQ ID NO: 891 - DNA, 201 bp, Homo sapiens
ctctggctcttctttcagcgttttcggccacccaggcacggaaaggcttctgggactacttcagccagaccagcggggacaaaggcagggtggagcagatmcatcagcagaagatggctcgcgagcccgcgtgagtgcccaggggaaggggtgtaggcgaagggaggagacagctgggccatgccatgatgacctgcctct

SEQ ID NO: 892 - DNA, 201 bp, Homo sapiens
cctctagcatggttcagtccttgaaagtggcctgttgggtggagggtggaaggtcctgtgcaggacagggaggccaccaaaggggctgctgtctcctgcayatccagcctcctgcgactccccaatctggatgcattacattcaccaggctttgcaaacccagcctcccagtgctcatttgggaatgctcatgagttactc

SEQ ID NO: 893 - DNA, 201 bp, Homo sapiens
tggctgccgtgctcacctgggctctggctcttctttcagcgttttcggccacccaggcacggaaaggcttctgggactacttcagccagaccagcggggamaaaggcagggtggagcagatccatcagcagaagatggctcgcgagcccgcgtgagtgcccaggggaaggggtgtaggcgaagggaggagacagctgggcc

SEQ ID NO: 894 - DNA, 189 bp, Homo sapiens
ggcctccctccacctgtcttctcagagcagataatggcaagcatggctgccgtgctcacctgggctctggctcttctttcagcgttttsggccacccaggcacggaaaggcttctgggactacttcagccagaccagcggggacaaaggcagggtggagcagatccatcagcagaagatggctcgcgag

SEQ ID NO: 895 - DNA, 201 bp, Homo sapiens
gcgcgtggtgggggaagacaccaaggcccagttgctggggggcgtggacgaggcttgggctttgctgcagggactgcagagccgcgtggtgcaccacacckgccgcttcaaagagctcttccacccatacgccgagagcctggtgagcggcatcgggcgccacgtgcaggagctgcaccgcagtgtggctccgcacgcccc

SEQ ID NO: 896 - DNA, 201 bp, Homo sapiens
ctggaatttggagggcttgcggcagcaactgaagccctacacgatggatctgatggagcaggtggccctgcgcgtgcaggagctgcaggagcagttgcgcrtggtgggggaagacaccaaggcccagttgctggggggcgtggacgaggcttgggctttgctgcagggactgcagagccgcgtggtgcaccacaccggccg

SEQ ID NO: 897 - DNA, 201 bp, Homo sapiens
agagcctttgcaggcactgggactgaggaaggggccggcccggacccccagatgctctccgaggaggtgcgccagcgacttcaggctttccgccaggacayctacctgcagatagctgccttcactcgcgccatcgaccaggagactgaggaggtccagcagcagctggcgccacctccaccaggccacagtgccttcgcc

SEQ ID NO: 898 - DNA, 201 bp, Homo sapiens
catgcatgtgggtgattatctgcaagcctgtttgccgtgatgctggaagcctgtgccactacatcctggagtttggctctagtcacttctggctgcctggyggccactgctacagctggtccacagagaggagcacttgtctccccagggctgccatggcagctatcaggggaatagaagggagaaagagaatatcatggg

SEQ ID NO: 899 - DNA, 201 bp, Homo sapiens
tcgcgccatcgaccaggagactgaggaggtccagcagcagctggcgccacctccaccaggccacagtgccttcgccccagagtttcaacaaacagacagtrgcaaggttctgagcaagctgcaggcccgtctggatgacctgtgggaagacatcactcacagccttcatgaccagggccacagccatctgggggacccctg

SEQ ID NO: 900 - DNA, 201 bp, Homo sapiens
agccttcatgaccagggccacagccatctgggggacccctgaggatctacctgcccaggcccattcccagctccttgtctggggagccttggctctgagcmtctagcatggttcagtccttgaaagtggcctgttgggtggagggtggaaggtcctgtgcaggacagggaggccaccaaaggggctgctgtctcctgcata

SEQ ID NO: 901 - DNA, 201 bp, Homo sapiens
ggatgacctgtgggaagacatcactcacagccttcatgaccagggccacagccatctgggggacccctgaggatctacctgcccaggcccattcccagctycttgtctggggagccttggctctgagcctctagcatggttcagtccttgaaagtggcctgttgggtggagggtggaaggtcctgtgcaggacagggaggc

SEQ ID NO: 902 - DNA, 131 bp, Homo sapiens
ggcctccctccacctgtcttctcagagcagrtaatggcaagcatggctgccgtgctcacctgggctctggctcttctttcagcgttttcggccacccaggcacggaaaggcttctgggactacttcagcca

SEQ ID NO: 903 - DNA, 201 bp, Homo sapiens; identical to SEQ ID NO: 890

SEQ ID NO: 904 - DNA, 201 bp, Homo sapiens
ctctggctcttctttcagcgttttcggccacccaggcacggaaaggcttctgggactacttcagccagaccagcggggacaaaggcagggtggagcagatmcatcagcagaagatggctcgcgagcccgcgaccctgaaagacagccttgagcaagacctcaacaatatgaacaagttcctggaaaagctgaggcctctga

SEQ ID NO: 905 - DNA, 201 bp, Homo sapiens; identical to SEQ ID NO: 892

SEQ ID NO: 906 - DNA, 201 bp, Homo sapiens
tggctgccgtgctcacctgggctctggctcttctttcagcgttttcggccacccaggcacggaaaggcttctgggactacttcagccagaccagcggggamaaaggcagggtggagcagatccatcagcagaagatggctcgcgagcccgcgaccctgaaagacagccttgagcaagacctcaacaatatgaacaagttcc

SEQ ID NO: 907 - DNA, 189 bp, Homo sapiens; identical to SEQ ID NO: 894

SEQ ID NO: 908 - DNA, 201 bp, Homo sapiens; identical to SEQ ID NO: 895

SEQ ID NO: 909 - DNA, 201 bp, Homo sapiens; identical to SEQ ID NO: 896

SEQ ID NO: 910 - DNA, 201 bp, Homo sapiens; identical to SEQ ID NO: 898

SEQ ID NO: 911 - DNA, 201 bp, Homo sapiens; identical to SEQ ID NO: 897

SEQ ID NO: 912 - DNA, 201 bp, Homo sapiens; identical to SEQ ID NO: 899

SEQ ID NO: 913 - DNA, 201 bp, Homo sapiens; identical to SEQ ID NO: 900

SEQ ID NO: 914 - DNA, 201 bp, Homo sapiens; identical to SEQ ID NO: 901

SEQ ID NO: 915 - DNA, 131 bp, Homo sapiens; identical to SEQ ID NO: 902

SEQ ID NO: 916 - DNA, 201 bp, Homo sapiens
acggacatcgacgagtgcgaaaacggcggcttctgctccggggtgtgccacaacctccccggtaccttcgagtgcatctgcgggcccgactcggcccttgyccgccacattggcaccgactgtgactccggcaaggtggacggtggcgacagcggctctggcgagcccccgcccagcccgacgcccggctccaccttgact

SEQ ID NO: 917 - DNA, 201 bp, Homo sapiens
accccagcacttgtgttgtctggtgatggcaccatctctgattttcaaagctttttccagaggctattattttcactgtagaatgatttcatgctatctcygtgtgcacaaatatttattttctttctgtaaccataacaacttcatatatgaggacttgtgtctctgtgcttttaaatgcataaatgcattataggatca

SEQ ID NO: 918 - DNA, 201 bp, Homo sapiens
cgcagagactctgagcggcctccgtccaggagcctggctccgtccaggagcctgtgcctcctcacccccagctttgctaccaaagcaccttagctggcatkacagctggagaagaccctccccgcaccccccaagctgttttcttctattccatggctaactggcgagggggtgattagagggaggagaatgagcctcggc

SEQ ID NO: 919 - DNA, 201 bp, Homo sapiens
tgagcctcggcctcttccgtgacgtcactggaccactgggcaatgatggcaattttgtaacgaagacacagactgcgatttgtcccaggtcctcactaccrggcgcaggagggtgagcgttattggtcggcagccttctgggcagaccttgacctcgtgggctagggatgactaaaatatttattttttttaagtatttag

SEQ ID NO: 920 - DNA, 201 bp, Homo sapiens
ctcaatgccagtcagatctgcgacggactgcggggccacctaatgacagtgcgctcctcggtggctgccgatgtcatttccttgctactgaacggcgacgscggcgttggccgccggcgcctctggatcggcctgcagctgccacccggctgcggcgaccccaagcgcctcgggcccctgcgcggcttccagtgggttacg

SEQ ID NO: 921 - DNA, 201 bp, Homo sapiens
tgccctcattttatgtcattaaatggggctcacaaaccatgcaaatgctatgagatgcatggagggctgccctgtaccccagcacttgtgttgtctggtgrtggcaccatctctgattttcaaagctttttccagaggctattattttcactgtagaatgatttcatgctatctctgtgtgcacaaatatttattttcttt

SEQ ID NO: 922 - DNA, 201 bp, Homo sapiens
gctggccctggccggcctggggttccccgcacccgcagagccgcagccgggtggcagccagtgcgtcgagcacgactgcttcgcgctctacccgggccccrcgaccttcctcaatgccagtcagatctgcgacggactgcggggccacctaatgacagtgcgctcctcggtggctgccgatgtcatttccttgctactgaa

SEQ ID NO: 923 - DNA, 201 bp, Homo sapiens
ctgcctcgcaggggctgcgcgcagcggcaagaagtgtctgggctgggacggacaggagaggctgtcgccatcggcgtcctgtgcccctctgctccggcacsgccctgtcgcagtgcccgcgctttccccggcgcctgcacgcggcgcgcctgggtaacatgcttggggtcctggtccttggcgcgctggccctggccggcc

SEQ ID NO: 924 - DNA, 201 bp, Homo sapiens
cggggtgtgccacaacctccccggtaccttcgagtgcatctgcgggcccgactcggcccttgcccgccacattggcaccgactgtgactccggcaaggtgkacggtggcgacagcggctctggcgagcccccgcccagcccgacgcccggctccaccttgactcctccggccgtggggctcgtgcattcgggcttgctcat

SEQ ID NO: 925 - DNA, 201 bp, Homo sapiens
ttcagagccaactgcgagtaccagtgccagcccctgaaccaaactagctacctctgcgtctgcgccgagggcttcgcgcccattccccacgagccgcacargtgccagatgttttgcaaccagactgcctgtccagccgactgcgaccccaacacccaggctagctgtgagtgccctgaaggctacatcctggacgacggt

SEQ ID NO: 926 - DNA, 201 bp, Homo sapiens
atatttgtacatagttatttatttattggagataatctagaacacaggcaaaatccttgcttatgacatcacttgtacaaaataaacaaataacaatgtgwtctcgggttgtgtgtctgttcacttttcctccctcagtgccctcattttatgtcattaaatggggctcacaaaccatgcaaatgctatgagatgcatgga

SEQ ID NO: 927 - DNA, 201 bp, Homo sapiens
cccgactcggcccttgcccgccacattggcaccgactgtgactccggcaaggtggacggtggcgacagcggctctggcgagcccccgcccagcccgacgcycggctccaccttgactcctccggccgtggggctcgtgcattcgggcttgctcataggcatctccatcgcgagcctgtgcctggtggtggcgcttttggcg

SEQ ID NO: 928 - DNA, 201 bp, Homo sapiens
cttcgagtgcatctgcgggcccgactcggcccttgcccgccacattggcaccgactgtgactccggcaaggtggacggtggcgacagcggctctggcgagyccccgcccagcccgacgcccggctccaccttgactcctccggccgtggggctcgtgcattcgggcttgctcataggcatctccatcgcgagcctgtgcct

SEQ ID NO: 929 - DNA, 201 bp, Homo sapiens
cacggccctgtcgcagtgcccgcgctttccccggcgcctgcacgcggcgcgcctgggtaacatgcttggggtcctggtccttggcgcgctggccctggccrgcctggggttccccgcacccgcagagccgcagccgggtggcagccagtgcgtcgagcacgactgcttcgcgctctacccgggccccgcgaccttcctcaa

SEQ ID NO: 930 - DNA, 201 bp, Homo sapiens
tggggctcccctctgcggcccgttgtgcgtcgctgtctccgctgctgaggccactgtgcccagcgagccgatctgggaggagcagcagtgcgaagtgaagsccgatggcttcctctgcgagttccacttcccagccacctgcaggccactggctgtggagcccggcgccgcggctgccgccgtctcgatcacctacggcac

SEQ ID NO: 931 - DNA, 201 bp, Homo sapiens
tattttgtaaactcaaaatatttgtacatagttatttatttattggagataatctagaacacaggcaaaatccttgcttatgacatcacttgtacaaaatmaacaaataacaatgtgctctcgggttgtgtgtctgttcacttttcctccctcagtgccctcattttatgtcattaaatggggctcacaaaccatgcaaat

SEQ ID NO: 932 - DNA, 201 bp, Homo sapiens
aaaatggccatttgctttttcaccagatttgctaatttatcctgaaatttcagattcccagagcaaaataattttaaacaaaggttgagatgtaaaaggtrttaaattgatgttgctggactgtcatagaaattacacccaaagaggtatttatctttacttttaaacagtgagcctgaattttgttgctgttttgatttg

SEQ ID NO: 933 - DNA, 201 bp, Homo sapiens
aactactacttactggatacattcaaaccctccagaatcaacagttatcaggtaaccaacaagaaatgcaagccgtcgacaacctcacctctgcgcctggkaacaccagtctgtgcaccagagactacaaaatcacccaggtcctcttcccactgctctacactgtcctgttttttgttggacttatcacaaatggcctgg

SEQ ID NO: 934 - DNA, 201 bp, Homo sapiens
gggcattcatgttcttactctctttgcctaacatgattctgaccaacaggcagccgagagacaagaatgtgaagaaatgctctttccttaaatcagagttyggtctagtctggcatgaaatagtaaattacatctgtcaagtcattttctggattaatttcttaattgttattgtatgttatacactcattacaaaagaac

SEQ ID NO: 935 - DNA, 201 bp, Homo sapiens
aagaagcaactaagttaataataatgactctaaagaaacagaagattacaaaagcaattttcatttacctttccagtatgaaaagctatcttaaaatatakaaaactaatctaaactgtagctgtattagcagcaaaacaaacgacatccaattgtcatgctgcatgcaaaactacacagaattcatgttttgcagagttt

SEQ ID NO: 936 - DNA, 201 bp, Homo sapiens
cactctgcaggttgcaataactactacttactggatacattcaaaccctccagaatcaacagttatcaggtaaccaacaagaaatgcaagccgtcgacaayctcacctctgcgcctggtaacaccagtctgtgcaccagagactacaaaatcacccaggtcctcttcccactgctctacactgtcctgttttttgttggac

SEQ ID NO: 937 - DNA, 201 bp, Homo sapiens
aagactttactgacgaaaactcaggaaatcctctatcacaaagaggtttggcaactaaactaagacattaaaaggaaaataccagatgccactctgcaggytgcaataactactacttactggatacattcaaaccctccagaatcaacagttatcaggtaaccaacaagaaatgcaagccgtcgacaacctcacctctgc

SEQ ID NO: 938 - DNA, 201 bp, Homo sapiens; identical to SEQ ID NO: 933

SEQ ID NO: 939 - DNA, 201 bp, Homo sapiens; identical to SEQ ID NO: 934

SEQ ID NO: 940 - DNA, 201 bp, Homo sapiens; identical to SEQ ID NO: 935

SEQ ID NO: 941 - DNA, 201 bp, Homo sapiens; identical to SEQ ID NO: 936

SEQ ID NO: 942 - DNA, 201 bp, Homo sapiens; identical to SEQ ID NO: 937

SEQ ID NO: 943 - DNA, 201 bp, Homo sapiens
tgtgccttagtagtatttatgaagacttgaagatgtaccaggtggagttcaagaccatgaatgcaaagcttctgatggatcctaagaggcagatctttctrgatcaaaacatgctggcagttattgatgagctgatgcaggccctgaatttcaacagtgagactgtgccacaaaaatcctcccttgaagaaccggattttt

SEQ ID NO: 944 - DNA, 201 bp, Homo sapiens
gagaagctgatgtagagagagacacagaaggagacagaaagcaagagaccagagtcccgggaaagtcctgccgcgcctcgggacaattataaaaatgtggycccctgggtcagcctcccagccaccgccctcacctgccgcggccacaggtctgcatccagcggctcgccctgtgtccctgcagtgccggctcagcatgtg

SEQ ID NO: 945 - DNA, 201 bp, Homo sapiens
cgttgtcatttttataaaactttgaaatgaggaaactttgataggatgtggattaagaactagggagggggaaagaaggatgggactattacatccacatratacctctgatcaagtatttttgacatttactgtggataaattgtttttaagttttcatgaatgaattgctaagaagggaaaatatccatcctgaaggtg

SEQ ID NO: 946 - DNA, 201 bp, Homo sapiens
aaatcctcccttgaagaaccggatttttataaaactaaaatcaagctctgcatacttcttcatgctttcagaattcgggcagtgactattgatagagtgaygagctatctgaatgcttcctaaaaagcgaggtccctccaaaccgttgtcatttttataaaactttgaaatgaggaaactttgataggatgtggattaaga

SEQ ID NO: 947 - DNA, 201 bp, Homo sapiens
tgccacaaaaatcctcccttgaagaaccggatttttataaaactaaaatcaagctctgcatacttcttcatgctttcagaattcgggcagtgactattgayagagtgatgagctatctgaatgcttcctaaaaagcgaggtccctccaaaccgttgtcatttttataaaactttgaaatgaggaaactttgataggatgtg

SEQ ID NO: 948 - DNA, 201 bp, Homo sapiens
aggtccctccaaaccgttgtcatttttataaaactttgaaatgaggaaactttgataggatgtggattaagaactagggagggggaaagaaggatgggacyattacatccacatgatacctctgatcaagtatttttgacatttactgtggataaattgtttttaagttttcatgaatgaattgctaagaagggaaaatat

SEQ ID NO: 949 - DNA, 201 bp, Homo sapiens
tgcttcctaaaaagcgaggtccctccaaaccgttgtcatttttataaaactttgaaatgaggaaactttgataggatgtggattaagaactagggaggggraaagaaggatgggactattacatccacatgatacctctgatcaagtatttttgacatttactgtggataaattgtttttaagttttcatgaatgaattgc

SEQ ID NO: 950 - DNA, 201 bp, Homo sapiens
cgcctgtggaccccgcgcagtaactgcgaacatttcgctttcattttgggccgagctggaggcggcggggccgtcccggaacggctgcggccgggcacccsgggagttaatccgaaagcgccgcaagccccgcgggccggccgcaccgcacgtgtcaccgagaagctgatgtagagagagacacagaaggagacagaaagc

SEQ ID NO: 951 - DNA, 201 bp, Homo sapiens
aaagcttctgatggatcctaagaggcagatctttctagatcaaaacatgctggcagttattgatgagctgatgcaggccctgaatttcaacagtgagactrtgccacaaaaatcctcccttgaagaaccggatttttataaaactaaaatcaagctctgcatacttcttcatgctttcagaattcgggcagtgactattga

SEQ ID NO: 952 - DNA, 201 bp, Homo sapiens; identical to SEQ ID NO: 943

SEQ ID NO: 953 - DNA, 201 bp, Homo sapiens; identical to SEQ ID NO: 944

SEQ ID NO: 954 - DNA, 201 bp, Homo sapiens; identical to SEQ ID NO: 945

SEQ ID NO: 955 - DNA, 201 bp, Homo sapiens; identical to SEQ ID NO: 946

SEQ ID NO: 956 - DNA, 201 bp, Homo sapiens; identical to SEQ ID NO: 948

SEQ ID NO: 957 - DNA, 201 bp, Homo sapiens; identical to SEQ ID NO: 947

SEQ ID NO: 958 - DNA, 201 bp, Homo sapiens; identical to SEQ ID NO: 949

SEQ ID NO: 959 - DNA, 201 bp, Homo sapiens; identical to SEQ ID NO: 950

SEQ ID NO: 960 - DNA, 201 bp, Homo sapiens; identical to SEQ ID NO: 951

SEQ ID NO: 961 - DNA, 201 bp, Homo sapiens
aagattgctcacaaagtacatgctcaagtcatcagataacatgctccaatggtcagtgtatcccaagtgaatacaggtgcgaccacgtcagagactgcccmgatggagctgatgagaatgactgccagtacccaacatgtgagcagcttacttgtgacaatggggcctgctataacaccagtcagaagtgtgattggaaag

SEQ ID NO: 962 - DNA, 201 bp, Homo sapiens
caagtgtactaccaggcttccctgaggccctatggagtgactgtttaccattccctcagacagccctatgctaccaatccgtgtaaagataacaatggggrctgtgagcaggtctgtgttctcagccacagaacagataatgatggtttgggtttccgttgcaagtgcacattcggcttccaactggatacagatgagcgc

SEQ ID NO: 963 - DNA, 201 bp, Homo sapiens
atttgcctgcctgtaccaggaggattgttttcctgcgcctgtgccactggatttaaactcaatcctgataatcggtcctgctctccatataactctttcaytgttgtttcaatgctgtctgcaatcagaggctttagcttggaattgtcagatcattcagaaaccatggtgccggtggcaggccaaggacgaaacgcactg

SEQ ID NO: 964 - DNA, 121 bp, Homo sapiens
tgcacaacaggaaccatggcaggaatatacactttcccatagcaaatagcatacctgactctctgtgctaatattgcacatttgttaaacaatgaatgaadggatggatggatggatggat

SEQ ID NO: 965 - DNA, 201 bp, Homo sapiens
ggtcctgctctccatataactctttcattgttgtttcaatgctgtctgcaatcagaggctttagcttggaattgtcagatcattcagaaaccatggtgccrgtggcaggccaaggacgaaacgcactgcatgtggatgtggatgtgtcctctggctttatttattggtgtgattttagcagctcagtggcatctgataatg

SEQ ID NO: 966 - DNA, 201 bp, Homo sapiens
cggtgccaaatttccagcgagtgtgtgggtgcccttatggaatgaggctggcttccaatcacttgacatgcgagggggacccaaccaatgaaccacccacrgagcagtgtggcttattttccttcccctgtaaaaatggcagatgtgtgcccaattactatctctgtgatggagtcgatgattgtcatgataacagtgatg

SEQ ID NO: 967 - DNA, 201 bp, Homo sapiens
gccacttctgcttcccggtgccaaatttccagcgagtgtgtgggtgcccttatggaatgaggctggcttccaatcacttgacatgcgagggggacccaacmaatgaaccacccacagagcagtgtggcttattttccttcccctgtaaaaatggcagatgtgtgcccaattactatctctgtgatggagtcgatgattgtc

SEQ ID NO: 968 - DNA, 201 bp, Homo sapiens
agatgaacgtcaagattgctcacaaagtacatgctcaagtcatcagataacatgctccaatggtcagtgtatcccaagtgaatacaggtgcgaccacgtcrgagactgccccgatggagctgatgagaatgactgccagtacccaacatgtgagcagcttacttgtgacaatggggcctgctataacaccagtcagaagtg

SEQ ID NO: 969 - DNA, 201 bp, Homo sapiens
ccagttcacttgccccagtggccgatgcatttatcaaaactgggtttgtgatggagaagatgactgtaaagataatggagatgaagatggatgtgaaagcsgtcctcatgatgttcataaatgttccccaagagaatggtcttgcccagagtcgggacgatgcatctccatttataaagtttgtgatgggattttagattg

SEQ ID NO: 970 - DNA, 201 bp, Homo sapiens
gccatcgattgggctgcttcacgattgtactgggtagatgcctattttgataaaattgagcacagcacctttgatggtttagacagaagaagactgggccrtatagagcagatgacacatccgtttggacttgccatctttggagagcatttattttttactgactggagactgggtgccattattcgagtcaggaaagca

SEQ ID NO: 971 - DNA, 201 bp, Homo sapiens
aaagtttggcttttgattggatttcaaagaatctctattggacagactctcattacaagagtatcagtgtcatgaggctagctgataaaacgagacgcacrgtagttcagtatttaaataacccacggtcggtggtagttcatccttttgccgggtatctattcttcactgattggttccgtcctgctaaaattatgagag

SEQ ID NO: 972 - DNA, 201 bp, Homo sapiens
atatgtcaaaacacatgatttttaagcaaaagattgatggcacaggaagagaaattctcgcagctaacagggtggaaaatgttgaaagtttggcttttgaytggatttcaaagaatctctattggacagactctcattacaagagtatcagtgtcatgaggctagctgataaaacgagacgcacagtagttcagtatttaa

SEQ ID NO: 973 - DNA, 201 bp, Homo sapiens
ccggggaaggaacggcgaggccggggaccgtcgcggagatggatcgcgggccggcagcagtggcgtgcacgctgctcctggctctcgtcgcctgcctagcsccggccagtggccaagaatgtgacagtgcgcattttcgctgtggaagtgggcattgcatccctgcagactggaggtgtgatgggaccaaagactgttcag

SEQ ID NO: 974 - DNA, 201 bp, Homo sapiens
cttggagttggctttccaattggcataactgttgatcctgctcgtgggaagctgtactggtcagaccaaggaactgacagtggggttcctgccaagatcgscagtgctaacatggatggcacatctgtgaaaactctctttactgggaacctcgaacacctggagtgtgtcactcttgacatcgaagagcagaaactctac

SEQ ID NO: 975 - DNA, 201 bp, Homo sapiens
gcagccacctctgccttctgagacctggaggatacagctgtgcctgtccccaaggctccagctttatagaggggagcaccactgagtgtgatgcagccatygaactgcctatcaacctgccccccccatgcaggtgcatgcacggaggaaattgctattttgatgagactgacctccccaaatgcaagtgtcctagcggct

SEQ ID NO: 976 - DNA, 201 bp, Homo sapiens
tgccagcagggctatttcaagtgccagagtgagggacaatgcatccccaactcctgggtgtgtgaccaagatcaagactgtgatgatggctcagatgaacrtcaagattgctcacaaagtacatgctcaagtcatcagataacatgctccaatggtcagtgtatcccaagtgaatacaggtgcgaccacgtcagagactgc

SEQ ID NO: 977 - DNA, 201 bp, Homo sapiens
ggatgagcccattgaagaatgcatgagctctgcccatctctgtgacaacttcacagaattcagctgcaaaacaaattaccgctgcatcccaaagtgggccrtgtgcaatggtgtagatgactgcagggacaacagtgatgagcaaggctgtgaggagaggacatgccatcctgtgggggatttccgctgtaaaaatcacca

SEQ ID NO: 978 - DNA, 201 bp, Homo sapiens
tcattgaaagagttgataaggccactggggccaacaaaatagtcttgagagataatgttccaaatctgaggggtcttcaagtttatcacagacgcaatgcygccgaatcctcaaatggctgtagcaacaacatgaatgcctgtcagcagatttgcctgcctgtaccaggaggattgttttcctgcgcctgtgccactggat

SEQ ID NO: 979 - DNA, 201 bp, Homo sapiens
attgtcatgataacagtgatgagcaactatgtggcacacttaataatacctgttcatcttcggcgttcacctgtggccatggggagtgcattcctgcacamtggcgctgtgacaaacgcaacgactgtgtggatggcagtgatgagcacaactgccccacccacgcacctgcttcctgccttgacacccaatacacctgtg

SEQ ID NO: 980 - DNA, 201 bp, Homo sapiens
aaatctgaggggtcttcaagtttatcacagacgcaatgccgccgaatcctcaaatggctgtagcaacaacatgaatgcctgtcagcagatttgcctgcctrtaccaggaggattgttttcctgcgcctgtgccactggatttaaactcaatcctgataatcggtcctgctctccatataactctttcattgttgtttcaat

SEQ ID NO: 981 - DNA, 201 bp, Homo sapiens
cctgtccccaaggctccagctttatagaggggagcaccactgagtgtgatgcagccatcgaactgcctatcaacctgccccccccatgcaggtgcatgcayggaggaaattgctattttgatgagactgacctccccaaatgcaagtgtcctagcggctacaccggaaaatattgtgaaatggcgttttcaaaaggcatct

SEQ ID NO: 982 - DNA, 201 bp, Homo sapiens
caatgtccgaattcgaaaatataatctctcatctgagaggttctcagagtatcttcaagatgaggaatatatccaagctgttgattatgattgggatcccraggacataggcctcagtgttgtgtattacactgtgcgaggggagggctctaggtttggtgctatcaaacgtgcctacatccccaactttgaatccggccg

SEQ ID NO: 983 - DNA, 201 bp, Homo sapiens
cgtagaattaaaccagatggatcttctctgatgaacattgtgacacatggaataggagaaaatggagtccggggtattgcagtggattgggtagcaggaamtctttatttcaccaatgcctttgtttctgaaacactgatagaagttctgcggatcaatactacttaccgccgtgttcttcttaaagtcacagtggacatg

SEQ ID NO: 984 - DNA, 201 bp, Homo sapiens
ctgagatatgcttgcacaatgagttttcatgtggcaatggagagtgtatccctcgtgcttatgtctgtgaccatgacaatgattgccaagacggcagtgaygaacatgcttgcaactatccgacctgcggtggttaccagttcacttgccccagtggccgatgcatttatcaaaactgggtttgtgatggagaagatgact

SEQ ID NO: 985 - DNA, 201 bp, Homo sapiens
gactctctatggccagtatatttactggactgacttgtacacacaaagaatttaccgagctaacaaatatgacgggtcaggtcagattgcaatgaccacaratttgctctcccagcccaggggaatcaacactgttgtgaagaaccagaaacaacagtgtaacaatccttgtgaacagtttaatgggggctgcagccatat

SEQ ID NO: 986 - DNA, 201 bp, Homo sapiens
ctggactgacttgtacacacaaagaatttaccgagctaacaaatatgacgggtcaggtcagattgcaatgaccacaaatttgctctcccagcccaggggartcaacactgttgtgaagaaccagaaacaacagtgtaacaatccttgtgaacagtttaatgggggctgcagccatatctgtgcaccaggtccaaatggtgc

SEQ ID NO: 987 - DNA, 201 bp, Homo sapiens
ccctgaggccctatggagtgactgtttaccattccctcagacagccctatgctaccaatccgtgtaaagataacaatgggggctgtgagcaggtctgtgtyctcagccacagaacagataatgatggtttgggtttccgttgcaagtgcacattcggcttccaactggatacagatgagcgccactgcattgctgttcaga

SEQ ID NO: 988 - DNA, 201 bp, Homo sapiens
gagccaacaagtggcatggagggaaccagtcagttgtaatgtataatattcaatggccccttgggattgttgcggttcatccttcgaaacaaccaaattcygtgaatccatgtgccttttcccgctgcagccatctctgcctgctttcctcacaggggcctcatttttactcctgtgtttgtccttcaggatggagtctgt

SEQ ID NO: 989 - DNA, 201 bp, Homo sapiens
  misc_feature (1)...(201): n = A,T,C or G, or insertion/deletion polymorphism (see Tables 1-2)
cgtttatttgtgtgacggagacaatgactgtggagataacagtgatgaaaaccctacttattgcaccactcacacgtgcagcagcagtgagttccaatgcncatctgggcgctgtattcctcaacattggtattgtgatcaagaaacagattgttttgatgcctctgatgaacctgcctcttgtggtcactctgagcgaac

SEQ ID NO: 990 - DNA, 201 bp, Homo sapiens
cacgctttcctgatggtgcatactgccaggctactatgttcgaatgcaaaaaccatgtttgtatcccgccatattggaaatgtgatggcgatgatgactgyggcgatggttcagatgaagaacttcacctgtgcttggatgttccctgtaattcaccaaaccgtttccggtgtgacaacaatcgctgcatttatagtcatg

SEQ ID NO: 991 - DNA, 201 bp, Homo sapiens
cctgtggtaccaacaatggtggctgttctcatctctgcctcatcaagccaggaggaaaagggttcacttgcgagtgtccagatgacttccgcacccttcarctgagtggcagcacctactgcatgcccatgtgctccagcacccagttcctgtgcgctaacaatgaaaagtgcattcctatctggtggaaatgtgatggac

SEQ ID NO: 992 - DNA, 201 bp, Homo sapiens
cttcaccagctgctgatggaactcaggtgacaaaatggaatctcttcaaacgaaaatctaaacaaactaccaactttgaaaatccaatctatgcacagatrgagaacgagcaaaaggaaagtgttgctgcgacaccacctccatcaccttcgctccctgctaagcctaagcctccttcgagaagagacccaactccaacct

SEQ ID NO: 993 - DNA, 201 bp, Homo sapiens
ttgtccaggacaagatcttctggccctgcggcttaactattgactaccccaacagactgctctacttcatggactcctatcttgattacatggacttttgygattataatggacaccatcggagacaggtgatagccagtgatttgattatacggcacccctatgccctaactctctttgaagactctgtgtactggactg

SEQ ID NO: 994 - DNA, 201 bp, Homo sapiens
acctggagtgtgtcactcttgacatcgaagagcagaaactctactgggcagtcactggaagaggagtgattgaaagaggaaacgtggatggaacagatcgratgatcctggtacaccagctttcccacccctggggaattgcagtccatgattctttcctttattatactgatgaacagtatgaggtcattgaaagagttg

SEQ ID NO: 995 - DNA, 201 bp, Homo sapiens
ggggcttggcagtggaccgaagtgatggctacgtttattgggttgatgattctttagatataattgcaaggattcgtatcaatggagagaactctgaagtrattcgttatggcagtcgttacccaactccttatggcatcactgtttttgaaaattctatcatatgggtagataggaatttgaaaaagatcttccaagcca

SEQ ID NO: 996 - DNA, 201 bp, Homo sapiens
aaagtggctgatttccactgacctggaccaaccagctgctattgctgtgaatcccaaactagggcttatgttctggactgactggggaaaggaacctaaamtcgagtctgcctggatgaatggagaggaccgcaacatcctggttttcgaggaccttggttggccaactggcctttctatcgattatttgaacaatgaccg

SEQ ID NO: 997 - DNA, 201 bp, Homo sapiens
aggctcctacatctgtaagtgtgccccaggctacctccgagaaccagatggaaagacctgccggcaaaacagtaacatcgaaccctatctcatttttagcraccgttactatttgagaaatttaactatagatggctatttttactccctcatcttggaaggactggacaatgttgtggcattagattttgaccgagtaga

SEQ ID NO: 998 - DNA, 201 bp, Homo sapiens
aatcactatttatttcctaagttgaacctgaatagaaagggaaaccattcttattaagctttttattaggccctgtggctaaatgtgtacatttatattaraatgtactgtacagtccagatcttttctttaattcttattggttttttttttttttttttttttagagatggagtcttgctatattgccaaggctgatct

SEQ ID NO: 999 - DNA, 201 bp, Homo sapiens
gtactgcttctcaattcaagtgtgccagtggggataaatgtattggcgtcacaaatcgttgtgatggtgtttttgattgcagtgacaactcggatgaagcrggctgtccaaccaggcctcctggtatgtgccactcagatgaatttcagtgccaagaagatggtatctgcatcccgaacttctgggaatgtgatgggcatc

SEQ ID NO: 1000 - DNA, 201 bp, Homo sapiens
gatgagaaaggctgtggcattaatgaatgccatgacccttcaatcagtggctgcgatcacaactgcacagacaccttaaccagtttctattgttcctgtcrtcctggttacaagctcatgtctgacaagcggacttgtgttgatattgatgaatgcacagagatgccttttgtctgtagccagaagtgtgagaatgtaata

SEQ ID NO: 1001 - DNA, 201 bp, Homo sapiens
aacttctgggaatgtgatgggcatccagactgcctctatggatctgatgagcacaatgcctgtgtccccaagacttgcccttcatcatatttccactgtgmcaacggaaactgcatccacagggcatggctctgtgatcgggacaatgactgcggggatatgagtgatgagaaggactgccctactcagccctttcgctgt

SEQ ID NO: 1002 - DNA, 201 bp, Homo sapiens
tcttacttgccaatgattctaagacctgtgaagacatagatgaatgtgatattctaggctcttgtagccagcactgttacaatatgagaggttctttccgstgctcgtgtgatacaggctacatgttagaaagtgatgggaggacttgcaaagttacagcatctgagagtctgctgttacttgtggcaagtcagaacaaaa

SEQ ID NO: 1003 - DNA, 201 bp, Homo sapiens
ggtgactggtccgatgaactgggttgcaataaaggaaaagaaagaacatgtgctgaaaatatatgcgagcaaaattgtacccaattaaatgaaggaggatytatctgctcctgtacagctgggttcgaaaccaatgtttttgacagaacctcctgtctagatatcaatgaatgtgaacaatttgggacttgtccccagcac

SEQ ID NO: 1004 - DNA, 201 bp, Homo sapiens
gggagggctctaggtttggtgctatcaaacgtgcctacatccccaactttgaatccggccgcaataatcttgtgcaggaagttgacctgaaactgaaataygtaatgcagccagatggaatagcagtggactgggttggaaggcatatttactggtcagatgtcaagaataaacgcattgaggtggctaaacttgatggaa

SEQ ID NO: 1005 - DNA, 201 bp, Homo sapiens
gtgatacaggctacatgttagaaagtgatgggaggacttgcaaagttacagcatctgagagtctgctgttacttgtggcaagtcagaacaaaattattgcsgacagtgtcacctcccaggtccacaatatctattcattggtcgagaatggttcttacattgtagctgttgattttgattcaattagtggtcgtatctttt

SEQ ID NO: 1006 - DNA, 201 bp, Homo sapiens
ttgactgtaccaatcgaacagtgcttgtgtcagagggcattgtcacaccacggggcttggcagtggaccgaagtgatggctacgtttattgggttgatgaytctttagatataattgcaaggattcgtatcaatggagagaactctgaagtgattcgttatggcagtcgttacccaactccttatggcatcactgtttttg

SEQ ID NO: 1007 - DNA, 201 bp, Homo sapiens
ggttgatgattctttagatataattgcaaggattcgtatcaatggagagaactctgaagtgattcgttatggcagtcgttacccaactccttatggcatcrctgtttttgaaaattctatcatatgggtagataggaatttgaaaaagatcttccaagccagcaaggaaccagagaacacagagccacccacagtgataag

SEQ ID NO: 1008 - DNA, 201 bp, Homo sapiens
gcagaaagtctggctgtagactgggtttccagaaagctctactggttggatgcccgcctggatggcctctttgtctctgacctcaatggtggacaccgccrcatgctggcccagcactgtgtggatgccaacaacaccttctgctttgataatcccagaggacttgcccttcaccctcaatatgggtacctctactgggca

SEQ ID NO: 1009 - DNA, 201 bp, Homo sapiens
tttttgaaaattctatcatatgggtagataggaatttgaaaaagatcttccaagccagcaaggaaccagagaacacagagccacccacagtgataagagayaatatcaactggctaagagatgtgaccatctttgacaagcaagtccagccccggtcaccagcagaggtcaacaacaacccttgcttggaaaacaatggtg

SEQ ID NO: 1010 - DNA, 201 bp, Homo sapiens
aaactcgagtctgcctggatgaatggagaggaccgcaacatcctggttttcgaggaccttggttggccaactggcctttctatcgattatttgaacaatgrccgaatctactggagtgacttcaaggaggacgttattgaaaccataaaatatgatgggactgataggagagtcattgcaaaggaagcaatgaacccttac

SEQ ID NO: 1011 - DNA, 201 bp, Homo sapiens
tcaacagaaaatttcctcatctttgccttgtctaattccttgagaagcttacacttggaccctgaaaaccatagcccacctttccaaacaataaatgtggraagaactgtcatgtctctagactatgacagtgtaagtgatagaatctacttcacacaaaatttagcctctggagttggacagatttcctatgccaccctg

SEQ ID NO: 1012 - DNA, 201 bp, Homo sapiens
gggcagatcttaacatggatattggagtgtctggttttggacctgagactgctattgacaggtcaatggcaatgagtgaagactttgtcatggaaatgggraagcagcccataatatttgaaaacccaatgtactcagccagagacagtgctgtcaaagtggttcagccaatccaggtgactgtatctgaaaatgtggata

SEQ ID NO: 1013 - DNA, 201 bp, Homo sapiens
accaaagactgttcagatgacgcggatgaaattggctgcgctgttgtgacctgccagcagggctatttcaagtgccagagtgagggacaatgcatccccarctcctgggtgtgtgaccaagatcaagactgtgatgatggctcagatgaacgtcaagattgctcacaaagtacatgctcaagtcatcagataacatgctcc

SEQ ID NO: 1014 - DNA, 201 bp, Homo sapiens
cagtatgaggtcattgaaagagttgataaggccactggggccaacaaaatagtcttgagagataatgttccaaatctgaggggtcttcaagtttatcacaracgcaatgccgccgaatcctcaaatggctgtagcaacaacatgaatgcctgtcagcagatttgcctgcctgtaccaggaggattgttttcctgcgcctgt

SEQ ID NO: 1015 - DNA, 201 bp, Homo sapiens
ctgatgagctgatgcacctgtgccacaccccagaacccacgtgtccacctcacgagttcaagtgtgacaatgggcgctgcatcgagatgatgaaactctgyaaccacctagatgactgtttggacaacagcgatgagaaaggctgtggcattaatgaatgccatgacccttcaatcagtggctgcgatcacaactgcacag

SEQ ID NO: 1016 - DNA, 194 bp, Homo sapiens
cgcctggccccggctctctggaccttgtctcgctcgggagcggaaacagcggcagccagagcataaaatacacaagaggatttttatggaatgrctccttgttacaagaactgttttaatcatggacaaacaaaactcacagatgaatgcttctcacccggaaacaaacttgccagttgggtatcctcctcagt

SEQ ID NO: 1017 - DNA, 201 bp, Homo sapiens
aaaaataagtggtccatgtgttgtgtgcagctgttgtggagatgttgattttgagattaaatctcttgatgaacagtgtgtggttggcaaaatttccaagyactggactggaattttgagagaggcatttacagacgctgataactttggaatccagttccctttagaccttgatgttaaaatgaaagctgtaatgattgg

SEQ ID NO: 1018 - DNA, 201 bp, Homo sapiens
ttaaatctcttgatgaacagtgtgtggttggcaaaatttccaagcactggactggaattttgagagaggcatttacagacgctgataactttggaatccarttccctttagaccttgatgttaaaatgaaagctgtaatgattggtgcctgtttcctcattgacttcatgttttttgaaagcactggcagccaggaacaaa

SEQ ID NO: 1019 - DNA, 194 bp, Homo sapiens; identical to SEQ ID NO: 1016

SEQ ID NO: 1020 - DNA, 201 bp, Homo sapiens
cagcattccaagatagatcagatactgattcatcagcaaattgaacttctggaagattaaatctcttgatgaacagtgtgtggttggcaaaatttccaagyactggactggaattttgagagaggcatttacagacgctgataactttggaatccagttccctttagaccttgatgttaaaatgaaagctgtaatgattgg

SEQ ID NO: 1021 - DNA, 201 bp, Homo sapiens
ttcaggaaacgaaaccaggagccgcgggtgttggcgcaaaggttactcccagacccttttccggctgacttctgagaaggttgcgcagcagctgtgcccgrcagtctagaggcgcagaagaggaagccatcgcctggccccggctctctggaccttgtctcgctcgggagcggaaacagcggcagccagagaactgtttta

SEQ ID NO: 1022 - DNA, 201 bp, Homo sapiens; identical to SEQ ID NO: 1018

SEQ ID NO: 1023 - DNA, 201 bp, Homo sapiens
tatttaagtcagatagatcagatactgattcatcagcaaattgaacttctggaagattaaatctcttgatgaacagtgtgtggttggcaaaatttccaagyactggactggaattttgagagaggcatttacagacgctgataactttggaatccagttccctttagaccttgatgttaaaatgaaagctgtaatgattgg

SEQ ID NO: 1024 - DNA, 201 bp, Homo sapiens; identical to SEQ ID NO: 1021

SEQ ID NO: 1025 - DNA, 161 bp, Homo sapiens
ttaaatctcttgatgaacagtgtgtggttggcaaaatttccaagcactggactggaattttgagagaggcatttacagacgctgataactttggaatccarttccctttagaccttgatgttaaaatgaaagctgtaatgattggtgcctgtttcctcatt

SEQ ID NO: 1026 - DNA, 201 bp, Homo sapiens
acacaaaatactcataaaaaacagaactgtgcttccagcttgcttaaccagattagcaaatgaataattcaccaaagtctgaaatagcaaaactgtatttyctgctaacagattactctaattcttctaggtctggttcaattttaaagcaaaatacaaatgccttagaaaattgtattttctgttatcttaaatacaatc

SEQ ID NO: 1027 - DNA, 201 bp, Homo sapiens
ttcaggaaacgaaaccaggagccgcgggtgttggcgcaaaggttactcccagacccttttccggctgacttctgagaaggttgcgcagcagctgtgcccgrcagtctagaggcgcagaagaggaagccatcgcctggccccggctctctggaccttgtctcgctcgggagcggaaacagcggcagccagaggaccacataa

SEQ ID NO: 1028 - DNA, 141 bp, Homo sapiens
tatcttaaatacaatctatgataatggccaatagcaaacatttaattagcactgtttcctgcctttgttgtatgcctgatacatgtattaactcatttaawccttattgaaagtctgtgatgtataggtgctacatttttc

SEQ ID NO: 1029 - DNA, 201 bp, Homo sapiens; identical to SEQ ID NO: 1017

SEQ ID NO: 1030 - DNA, 201 bp, Homo sapiens; identical to SEQ ID NO: 1021

SEQ ID NO: 1031 - DNA, 201 bp, Homo sapiens; identical to SEQ ID NO: 1018

SEQ ID NO: 1032 - DNA, 201 bp, Homo sapiens; identical to SEQ ID NO: 1017

SEQ ID NO: 1033 - DNA, 201 bp, Homo sapiens; identical to SEQ ID NO: 1018

SEQ ID NO: 1034 - DNA, 201 bp, Homo sapiens; identical to SEQ ID NO: 1017

SEQ ID NO: 1035 - DNA, 201 bp, Homo sapiens
ttcaggaaacgaaaccaggagccgcgggtgttggcgcaaaggttactcccagacccttttccggctgacttctgagaaggttgcgcagcagctgtgcccgrcagtctagaggcgcagaagaggaagccatcgcctggccccggctctctggaccttgtctcgctcgggagcggaaacagcggcagccagagactcacagat

SEQ ID NO: 1036 - DNA, 201 bp, Homo sapiens; identical to SEQ ID NO: 1018

SEQ ID NO: 1037 - DNA, 201 bp, Homo sapiens
acaaagtcagggttcttcaagtcacaaagggaagggcaggaacaactcttgcctctcagtcccacacaaggcagctgtctcacactttacaagctgtgagrgacacatcagagccctgggcactgtcactgcttgcagcctgagtcctcctccacctcacagcagcgaccacagctccagtgatcacagctccaaagagaa

SEQ ID NO: 1038 - DNA, 201 bp, Homo sapiens
gccgccatgtccgccgcggtccaagagcgcaggtcctcgttcaaggcgatgtaatccttgccgtcgtaggcgtcctgccggtacccgcggaggaagcgccmgtccgaccccacgtcgcagccatacatcatctggatgggtgttagaccctggccccgcccccgctgtcagccccgcccaccgagccccgcccccgccccg

SEQ ID NO: 1039 - DNA, 201 bp, Homo sapiens
caagggtctcggggtcccgcggtttcggggaggatctcggacccagagactcgaggcgacccggccctccgtgggggatggggaggggtcgtgacctgcgycccgggccggggtcactcaccgccctcgctctggttgtagtagctgtctcctcttcccaatactccggcccctcctgctccacccacggcgcccgcggct

SEQ ID NO: 1040 - DNA, 201 bp, Homo sapiens
atctgagccgccatgtccgccgcggtccaagagcgcaggtcctcgttcaaggcgatgtaatccttgccgtcgtaggcgtcctgccggtacccgcggaggargcgcccgtccgaccccacgtcgcagccatacatcatctggatgggtgttagaccctggccccgcccccgctgtcagccccgcccaccgagccccgccccc

SEQ ID NO: 1041 - DNA, 201 bp, Homo sapiens
actttacaagctgtgagagacacatcagagccctgggcactgtcactgcttgcagcctgagtcctcctccacctcacagcagcgaccacagctccagtgawcacagctccaaagagaaccaggccagcaatgatgcccacgatggggatggtgggctgggaagacggctcccatctcagggtgaggggcttgggcaaaccc

SEQ ID NO: 1042 - DNA, 201 bp, Homo sapiens
ccacttgcgctgggtgatctgagccgccatgtccgccgcggtccaagagcgcaggtcctcgttcaaggcgatgtaatccttgccgtcgtaggcgtcctgcyggtacccgcggaggaagcgcccgtccgaccccacgtcgcagccatacatcatctggatgggtgttagaccctggccccgcccccgctgtcagccccgccc

SEQ ID NO: 1043 - DNA, 201 bp, Homo sapiens
taggctctcaactgctccgccacacgggccgcctcccacttgcgctgggtgatctgagccgccatgtccgccgcggtccaagagcgcaggtcctcgttcarggcgatgtaatccttgccgtcgtaggcgtcctgccggtacccgcggaggaagcgcccgtccgaccccacgtcgcagccatacatcatctggatgggtgtt

SEQ ID NO: 1044 - DNA, 201 bp, Homo sapiens
ccaggtatctgcggagccactccacgcacgtgccctccaggtaggctctcaactgctccgccacacgggccgcctcccacttgcgctgggtgatctgagcygccatgtccgccgcggtccaagagcgcaggtcctcgttcaaggcgatgtaatccttgccgtcgtaggcgtcctgccggtacccgcggaggaagcgcccgt

SEQ ID NO: 1045 - DNA, 201 bp, Homo sapiens
tcgttcaaggcgatgtaatccttgccgtcgtaggcgtcctgccggtacccgcggaggaagcgcccgtccgaccccacgtcgcagccatacatcatctggaygggtgttagaccctggccccgcccccgctgtcagccccgcccaccgagccccgcccccgccccgaccaacccgcggggattttggctgaaaatgaaaccg

SEQ ID NO: 1046 - DNA, 201 bp, Homo sapiens
tctctcttcactttgcatcacggaatccccgtcccagaactggactccctgcctcctactccttacctgtccccgtggactcttctagaagaaaaatcacbccagggagcttgttgccagagagtgagcttgccctgggaatggaggtgtagagacagggttttttgttgttattgtttgtttgttttttaaatctggaaa

SEQ ID NO: 1047 - DNA, 201 bp, Homo sapiens
gtgcgtgggaactttagaaccgggaccgcggctacattgattggcttctctaggaacccgacactcaatgggagtgagaactggggcagcctggtgagtakccaggaagaaggacccgacacaggttgggagagggagaagagaaaccctgcggagatggggaatccccagcgctgggcctccccaatccatacaccgcct

SEQ ID NO: 1048 - DNA, 201 bp, Homo sapiens
cccgttctccaggtatctgcggagccactccacgcacgtgccctccaggtaggctctcaactgctccgccacacgggccgcctcccacttgcgctgggtgrtctgagccgccatgtccgccgcggtccaagagcgcaggtcctcgttcaaggcgatgtaatccttgccgtcgtaggcgtcctgccggtacccgcggaggaa

SEQ ID NO: 1049 - DNA, 201 bp, Homo sapiens
tcccggtgggtgcgtgggaactttagaaccgggaccgcggctacattgattggcttctctaggaacccgacactcaatgggagtgagaactggggcagcckggtgagtatccaggaagaaggacccgacacaggttgggagagggagaagagaaaccctgcggagatggggaatccccagcgctgggcctccccaatccat

SEQ ID NO: 1050 - DNA, 201 bp, Homo sapiens
tccttcccgttctccaggtatctgcggagccactccacgcacgtgccctccaggtaggctctcaactgctccgccacacgggccgcctcccacttgcgctkggtgatctgagccgccatgtccgccgcggtccaagagcgcaggtcctcgttcaaggcgatgtaatccttgccgtcgtaggcgtcctgccggtacccgcgg

SEQ ID NO: 1051 - DNA, 201 bp, Homo sapiens
gccatgacaccatcctcggcgactggggagaatcggagtcccggtgggtgcgtgggaactttagaaccgggaccgcggctacattgattggcttctctagraacccgacactcaatgggagtgagaactggggcagcctggtgagtatccaggaagaaggacccgacacaggttgggagagggagaagagaaaccctgcgg

SEQ ID NO: 1052 - DNA, 201 bp, Homo sapiens
cgtctccttcccgttctccaggtatctgcggagccactccacgcacgtgccctccaggtaggctctcaactgctccgccacacgggccgcctcccacttgygctgggtgatctgagccgccatgtccgccgcggtccaagagcgcaggtcctcgttcaaggcgatgtaatccttgccgtcgtaggcgtcctgccggtaccc

SEQ ID NO: 1053 - DNA, 201 bp, Homo sapiens
gaccccgcactcacctgcccaggtctgggtcaggaccagggcccccgagagcagcagaagcagggttcggggcgccatgacaccatcctcggcgactgggragaatcggagtcccggtgggtgcgtgggaactttagaaccgggaccgcggctacattgattggcttctctaggaacccgacactcaatgggagtgagaac

SEQ ID NO: 1054 - DNA, 201 bp, Homo sapiens
gtgcgctgcagcgtctccttcccgttctccaggtatctgcggagccactccacgcacgtgccctccaggtaggctctcaactgctccgccacacgggccgyctcccacttgcgctgggtgatctgagccgccatgtccgccgcggtccaagagcgcaggtcctcgttcaaggcgatgtaatccttgccgtcgtaggcgtcc

SEQ ID NO: 1055 - DNA, 201 bp, Homo sapiens
cccacgatggggatggtgggctgggaagacggctcccatctcagggtgaggggcttgggcaaaccctcatgctgcacatggcaggtgtatctctgctcctbtccagaaggcaccaccacagccgcccacttctggaaggttccatcccctgcaggcctggtctccacgagctccgtgtcctgggtctggtcctccccatcc

SEQ ID NO: 1056 - DNA, 201 bp, Homo sapiens
atgatgcccacgatggggatggtgggctgggaagacggctcccatctcagggtgaggggcttgggcaaaccctcatgctgcacatggcaggtgtatctctkctcctgtccagaaggcaccaccacagccgcccacttctggaaggttccatcccctgcaggcctggtctccacgagctccgtgtcctgggtctggtcctcc

SEQ ID NO: 1057 - DNA, 201 bp, Homo sapiens
tacctcaaggagtggaagcctgggagcaaggagggggctgagactctcccgaccctcctcccggcaccgcaaccgggttcctgcgcccccgccgggcaggmccctagctactccccacagaggccgtttccctcccgaccccgcactcacctgcccaggtctgggtcaggaccagggcccccgagagcagcagaagcaggg

SEQ ID NO: 1058 - DNA, 201 bp, Homo sapiens
gagacagagatggagacacctcagccccacctctctggaacaggaaagatgattggggagggagcacaggtcagcgtgggaagagggtcatggtggacatsggggtggggtggtctccccacctcctcacattatgcctacacgaacacagacacatgcaggtgcctttgcagaaacaaagtcagggttcttcaagtcaca

SEQ ID NO: 1059 - DNA, 201 bp, Homo sapiens
acctcctcacattatgcctacacgaacacagacacatgcaggtgcctttgcagaaacaaagtcagggttcttcaagtcacaaagggaagggcaggaacaamtcttgcctctcagtcccacacaaggcagctgtctcacactttacaagctgtgagagacacatcagagccctgggcactgtcactgcttgcagcctgagtc

SEQ ID NO: 1060 - DNA, 201 bp, Homo sapiens
  misc_feature (1)...(201): n = A,T,C or G, or insertion/deletion polymorphism (see Tables 1-2)
ggaaagatgattggggagggagcacaggtcagcgtgggaagagggtcatggtggacatgggggtggggtggtctccccacctcctcacattatgcctacangaacacagacacatgcaggtgcctttgcagaaacaaagtcagggttcttcaagtcacaaagggaagggcaggaacaactcttgcctctcagtcccacaca

SEQ ID NO: 1061 - DNA, 201 bp, Homo sapiens
caacctctcatggcaagaatttgagaaagtaaatttatactcaggttctaattttaatagggaaggaagaagttacagctcagtgcaccatgaagttgagrcagagatggagacacctcagccccacctctctggaacaggaaagatgattggggagggagcacaggtcagcgtgggaagagggtcatggtggacatgggg

SEQ ID NO: 1062 - DNA, 201 bp, Homo sapiens
gtccgtgcgctgcagcgtctccttcccgttctccaggtatctgcggagccactccacgcacgtgccctccaggtaggctctcaactgctccgccacacggrccgcctcccacttgcgctgggtgatctgagccgccatgtccgccgcggtccaagagcgcaggtcctcgttcaaggcgatgtaatccttgccgtcgtaggc

SEQ ID NO: 1063 - DNA, 201 bp, Homo sapiens
attttaggaatcttctcctttaattaactcatcaacctctcatggcaagaatttgagaaagtaaatttatactcaggttctaattttaatagggaaggaaraagttacagctcagtgcaccatgaagttgagacagagatggagacacctcagccccacctctctggaacaggaaagatgattggggagggagcacaggtc

SEQ ID NO: 1064 - DNA, 201 bp, Homo sapiens
atgtgttccatttattttgtctctcaaattttaggaatcttctcctttaattaactcatcaacctctcatggcaagaatttgagaaagtaaatttatactmaggttctaattttaatagggaaggaagaagttacagctcagtgcaccatgaagttgagacagagatggagacacctcagccccacctctctggaacagga

SEQ ID NO: 1065 - DNA, 201 bp, Homo sapiens
ggcgtccgtgcgctgcagcgtctccttcccgttctccaggtatctgcggagccactccacgcacgtgccctccaggtaggctctcaactgctccgccacaygggccgcctcccacttgcgctgggtgatctgagccgccatgtccgccgcggtccaagagcgcaggtcctcgttcaaggcgatgtaatccttgccgtcgta

SEQ ID NO: 1066 - DNA, 195 bp, Homo sapiens
gttctcatgtgttccatttattttgtctctcaaattttaggaatcttctcctttaattaactcatcaacctctcatggcaagaatttgagaaagkaaatttatactcaggttctaattttaatagggaaggaagaagttacagctcagtgcaccatgaagttgagacagagatggagacacctcagccccacctc

SEQ ID NO: 1067 - DNA, 201 bp, Homo sapiens
ggggcgtccgtgcgctgcagcgtctccttcccgttctccaggtatctgcggagccactccacgcacgtgccctccaggtaggctctcaactgctccgccasacgggccgcctcccacttgcgctgggtgatctgagccgccatgtccgccgcggtccaagagcgcaggtcctcgttcaaggcgatgtaatccttgccgtcg

SEQ ID NO: 1068 - DNA, 201 bp, Homo sapiens
gggggcgtccgtgcgctgcagcgtctccttcccgttctccaggtatctgcggagccactccacgcacgtgccctccaggtaggctctcaactgctccgccdcacgggccgcctcccacttgcgctgggtgatctgagccgccatgtccgccgcggtccaagagcgcaggtcctcgttcaaggcgatgtaatccttgccgtc

SEQ ID NO: 1069 - DNA, 201 bp, Homo sapiens
gtgagtcatatgcgttttgggggcgtccgtgcgctgcagcgtctccttcccgttctccaggtatctgcggagccactccacgcacgtgccctccaggtagrctctcaactgctccgccacacgggccgcctcccacttgcgctgggtgatctgagccgccatgtccgccgcggtccaagagcgcaggtcctcgttcaaggc

SEQ ID NO: 1070 - DNA, 119 bp, Homo sapiens
gttctcatgtgttccattwattttgtctctcaaattttaggaatcttctcctttaattaactcatcaacctctcatggcaagaatttgagaaagtaaatttatactcaggttctaattt

SEQ ID NO: 1071 - DNA, 201 bp, Homo sapiens
agacagcgtggtgagtcatatgcgttttgggggcgtccgtgcgctgcagcgtctccttcccgttctccaggtatctgcggagccactccacgcacgtgccmtccaggtaggctctcaactgctccgccacacgggccgcctcccacttgcgctgggtgatctgagccgccatgtccgccgcggtccaagagcgcaggtcct

SEQ ID NO: 1072 - DNA, 111 bp, Homo sapiens
gttctcatgtsttccatttattttgtctctcaaattttaggaatcttctcctttaattaactcatcaacctctcatggcaagaatttgagaaagtaaatttatactcaggt

SEQ ID NO: 1073 - DNA, 201 bp, Homo sapiens
cctccacctcacagcagcgaccacagctccagtgatcacagctccaaagagaaccaggccagcaatgatgcccacgatggggatggtgggctgggaagacrgctcccatctcagggtgaggggcttgggcaaaccctcatgctgcacatggcaggtgtatctctgctcctgtccagaaggcaccaccacagccgcccactt

SEQ ID NO: 1074 - DNA, 201 bp, Homo sapiens
gtaggcgtcctgccggtacccgcggaggaagcgcccgtccgaccccacgtcgcagccatacatcatctggatgggtgttagaccctggccccgcccccgckgtcagccccgcccaccgagccccgcccccgccccgaccaacccgcggggattttggctgaaaatgaaaccgggtaaaggcgcctgggcctctcccaggtc

SEQ ID NO: 1075 - DNA, 201 bp, Homo sapiens
gggagcaaggagggggctgagactctcccgaccctcctcccggcaccgcaaccgggttcctgcgcccccgccgggcaggcccctagctactccccacagasgccgtttccctcccgaccccgcactcacctgcccaggtctgggtcaggaccagggcccccgagagcagcagaagcagggttcggggcgccatgacaccat

SEQ ID NO: 1076 - DNA, 201 bp, Homo sapiens
ccacggagaggaagcggggatccgcgcggccgggccgggacatggtggtgtggaaatacctcaaggagtggaagcctgggagcaaggagggggctgagacbctcccgaccctcctcccggcaccgcaaccgggttcctgcgcccccgccgggcaggcccctagctactccccacagaggccgtttccctcccgaccccgca

SEQ ID NO: 1077 - DNA, 201 bp, Homo sapiens
acatgggggtggggtggtctccccacctcctcacattatgcctacacgaacacagacacatgcaggtgcctttgcagaaacaaagtcagggttcttcaagycacaaagggaagggcaggaacaactcttgcctctcagtcccacacaaggcagctgtctcacactttacaagctgtgagagacacatcagagccctgggca

SEQ ID NO: 1078 - DNA, 201 bp, Homo sapiens
taaatctggaaaagttgtgcctgagtgcatgagatagaatagagaccagtttgctttttgtttattaactacagtgggtagcagaatcttggtaactcctratgatcaggaatctaatcggccaaaaatgtgactttggtcccttgacatataaatgtgtctaaaagcattacaacaggaatcacaaagctcctaagtttc

SEQ ID NO: 1079 - DNA, 201 bp, Homo sapiens
cttgcagcctgagtcctcctccacctcacagcagcgaccacagctccagtgatcacagctccaaagagaaccaggccagcaatgatgcccacgatggggayggtgggctgggaagacggctcccatctcagggtgaggggcttgggcaaaccctcatgctgcacatggcaggtgtatctctgctcctgtccagaaggcacc

SEQ ID NO: 1080 - DNA, 201 bp, Homo sapiens
acacatcagagccctgggcactgtcactgcttgcagcctgagtcctcctccacctcacagcagcgaccacagctccagtgatcacagctccaaagagaacyaggccagcaatgatgcccacgatggggatggtgggctgggaagacggctcccatctcagggtgaggggcttgggcaaaccctcatgctgcacatggcagg

SEQ ID NO: 1081 - DNA, 201 bp, Homo sapiens
ttacaagctgtgagagacacatcagagccctgggcactgtcactgcttgcagcctgagtcctcctccacctcacagcagcgaccacagctccagtgatcayagctccaaagagaaccaggccagcaatgatgcccacgatggggatggtgggctgggaagacggctcccatctcagggtgaggggcttgggcaaaccctca

SEQ ID NO: 1082 - DNA, 201 bp, Homo sapiens
cacactttacaagctgtgagagacacatcagagccctgggcactgtcactgcttgcagcctgagtcctcctccacctcacagcagcgaccacagctccagygatcacagctccaaagagaaccaggccagcaatgatgcccacgatggggatggtgggctgggaagacggctcccatctcagggtgaggggcttgggcaaa

SEQ ID NO: 1083 - DNA, 201 bp, Homo sapiens
catggtggacatgggggtggggtggtctccccacctcctcacattatgcctacacgaacacagacacatgcaggtgcctttgcagaaacaaagtcagggtwcttcaagtcacaaagggaagggcaggaacaactcttgcctctcagtcccacacaaggcagctgtctcacactttacaagctgtgagagacacatcagagc

SEQ ID NO: 1084 - DNA, 201 bp, Homo sapiens
gagacacctcagccccacctctctggaacaggaaagatgattggggagggagcacaggtcagcgtgggaagagggtcatggtggacatgggggtggggtgstctccccacctcctcacattatgcctacacgaacacagacacatgcaggtgcctttgcagaaacaaagtcagggttcttcaagtcacaaagggaagggca

SEQ ID NO: 1085 - DNA, 110 bp, Homo sapiens
gttctcatgygttccatttattttgtctctcaaattttaggaatcttctcctttaattaactcatcaacctctcatggcaagaatttgagaaagtaaatttatactcagg

SEQ ID NO: 1086 - DNA, 201 bp, Homo sapiens
cctgggtctggtcctccccatcccgctgccaggtcagtgtgatctccgcagggtagaagctcagggcccagcacctcagggtggcttcatggtcagagacrgcgtggtgagtcatatgcgttttgggggcgtccgtgcgctgcagcgtctccttcccgttctccaggtatctgcggagccactccacgcacgtgccctcca

SEQ ID NO: 1087 - DNA, 201 bp, Homo sapiens
tggttgtagtagctgtctcctcttcccaatactccggcccctcctgctccacccacggcgcccgcggctccatcctgggactcgtggcgtcgctgtcgagscgcacgcactgcgtgtcgtccacgtcgcccacggagaggaagcggggatccgcgcggccgggccgggacatggtggtgtggaaatacctcaaggagtgga

SEQ ID NO: 1088 - DNA, 201 bp, Homo sapiens
caggtcctcgttcaaggcgatgtaatccttgccgtcgtaggcgtcctgccggtacccgcggaggaagcgcccgtccgaccccacgtcgcagccatacatcmtctggatgggtgttagaccctggccccgcccccgctgtcagccccgcccaccgagccccgcccccgccccgaccaacccgcggggattttggctgaaaat

SEQ ID NO: 1089 - DNA, 201 bp, Homo sapiens
atgtccgccgcggtccaagagcgcaggtcctcgttcaaggcgatgtaatccttgccgtcgtaggcgtcctgccggtacccgcggaggaagcgcccgtccgrccccacgtcgcagccatacatcatctggatgggtgttagaccctggccccgcccccgctgtcagccccgcccaccgagccccgcccccgccccgaccaac

SEQ ID NO: 1090 - DNA, 201 bp, Homo sapiens
catcccgctgccaggtcagtgtgatctccgcagggtagaagctcagggcccagcacctcagggtggcttcatggtcagagacagcgtggtgagtcatatgygttttgggggcgtccgtgcgctgcagcgtctccttcccgttctccaggtatctgcggagccactccacgcacgtgccctccaggtaggctctcaactgct

SEQ ID NO: 1091 - DNA, 201 bp, Homo sapiens
ggtcctccccatcccgctgccaggtcagtgtgatctccgcagggtagaagctcagggcccagcacctcagggtggcttcatggtcagagacagcgtggtgrgtcatatgcgttttgggggcgtccgtgcgctgcagcgtctccttcccgttctccaggtatctgcggagccactccacgcacgtgccctccaggtaggctc

SEQ ID NO: 1092 - DNA, 201 bp, Homo sapiens
tcctgggtctggtcctccccatcccgctgccaggtcagtgtgatctccgcagggtagaagctcagggcccagcacctcagggtggcttcatggtcagagayagcgtggtgagtcatatgcgttttgggggcgtccgtgcgctgcagcgtctccttcccgttctccaggtatctgcggagccactccacgcacgtgccctcc

SEQ ID NO: 1093 - DNA, 201 bp, Homo sapiens
taccttcattccatagccctgagtttctgtgtgagtccaggacatctcctaatacaaggtagccactgtgttactatatgttgtaaccaggagccagtacrgactttattcatctcacagtggcaagcactcaatgcagtcacaatgcccctcaccagtgctcatgcactgcctgtttttaggaagtatccacttctaagt

SEQ ID NO: 1094 - DNA, 201 bp, Homo sapiens
atagccctgagtttctgtgtgagtccaggacatctcctaatacaaggtagccactgtgttactatatgttgtaaccaggagccagtacggactttattcahctcacagtggcaagcactcaatgcagtcacaatgcccctcaccagtgctcatgcactgcctgtttttaggaagtatccacttctaagtgttgtgtatatt

SEQ ID NO: 1095 - DNA, 201 bp, Homo sapiens
cccgctgccaggtcagtgtgatctccgcagggtagaagctcagggcccagcacctcagggtggcttcatggtcagagacagcgtggtgagtcatatgcgtyttgggggcgtccgtgcgctgcagcgtctccttcccgttctccaggtatctgcggagccactccacgcacgtgccctccaggtaggctctcaactgctccg

SEQ ID NO: 1096 - DNA, 201 bp, Homo sapiens
ccacgagctccgtgtcctgggtctggtcctccccatcccgctgccaggtcagtgtgatctccgcagggtagaagctcagggcccagcacctcagggtggcytcatggtcagagacagcgtggtgagtcatatgcgttttgggggcgtccgtgcgctgcagcgtctccttcccgttctccaggtatctgcggagccactcca

SEQ ID NO: 1097 - DNA, 201 bp, Homo sapiens
ctccgtgggggatggggaggggtcgtgacctgcgccccgggccggggtcactcaccgccctcgctctggttgtagtagctgtctcctcttcccaatactcyggcccctcctgctccacccacggcgcccgcggctccatcctgggactcgtggcgtcgctgtcgagccgcacgcactgcgtgtcgtccacgtcgcccacgg

SEQ ID NO: 1098 - DNA, 201 bp, Homo sapiens
tggtctccacgagctccgtgtcctgggtctggtcctccccatcccgctgccaggtcagtgtgatctccgcagggtagaagctcagggcccagcacctcagrgtggcttcatggtcagagacagcgtggtgagtcatatgcgttttgggggcgtccgtgcgctgcagcgtctccttcccgttctccaggtatctgcggagcc

SEQ ID NO: 1099 - DNA, 201 bp, Homo sapiens
acatggtggtgtggaaatacctcaaggagtggaagcctgggagcaaggagggggctgagactctcccgaccctcctcccggcaccgcaaccgggttcctgmgcccccgccgggcaggcccctagctactccccacagaggccgtttccctcccgaccccgcactcacctgcccaggtctgggtcaggaccagggcccccga

SEQ ID NO: 1100 - DNA, 201 bp, Homo sapiens
gggccgcctcccacttgcgctgggtgatctgagccgccatgtccgccgcggtccaagagcgcaggtcctcgttcaaggcgatgtaatccttgccgtcgtargcgtcctgccggtacccgcggaggaagcgcccgtccgaccccacgtcgcagccatacatcatctggatgggtgttagaccctggccccgcccccgctgtc

SEQ ID NO: 1101 - DNA, 201 bp, Homo sapiens
gagatggagacacctcagccccacctctctggaacaggaaagatgattggggagggagcacaggtcagcgtgggaagagggtcatggtggacatgggggtkgggtggtctccccacctcctcacattatgcctacacgaacacagacacatgcaggtgcctttgcagaaacaaagtcagggttcttcaagtcacaaaggga

SEQ ID NO: 1102 - DNA, 201 bp, Homo sapiens
ttaatagggaaggaagaagttacagctcagtgcaccatgaagttgagacagagatggagacacctcagccccacctctctggaacaggaaagatgattggrgagggagcacaggtcagcgtgggaagagggtcatggtggacatgggggtggggtggtctccccacctcctcacattatgcctacacgaacacagacacat

SEQ ID NO: 1103 - DNA, 201 bp, Homo sapiens
gcaggtcctcgttcaaggcgatgtaatccttgccgtcgtaggcgtcctgccggtacccgcggaggaagcgcccgtccgaccccacgtcgcagccatacatyatctggatgggtgttagaccctggccccgcccccgctgtcagccccgcccaccgagccccgcccccgccccgaccaacccgcggggattttggctgaaaa

SEQ ID NO: 1104 - DNA, 201 bp, Homo sapiens
ttatactcaggttctaattttaatagggaaggaagaagttacagctcagtgcaccatgaagttgagacagagatggagacacctcagccccacctctctgsaacaggaaagatgattggggagggagcacaggtcagcgtgggaagagggtcatggtggacatgggggtggggtggtctccccacctcctcacattatgcc

SEQ ID NO: 1105 - DNA, 201 bp, Homo sapiens
agagcgcaggtcctcgttcaaggcgatgtaatccttgccgtcgtaggcgtcctgccggtacccgcggaggaagcgcccgtccgaccccacgtcgcagccawacatcatctggatgggtgttagaccctggccccgcccccgctgtcagccccgcccaccgagccccgcccccgccccgaccaacccgcggggattttggct

SEQ ID NO: 1106 - DNA, 201 bp, Homo sapiens
tgggtctggtcctccccatcccgctgccaggtcagtgtgatctccgcagggtagaagctcagggcccagcacctcagggtggcttcatggtcagagacagsgtggtgagtcatatgcgttttgggggcgtccgtgcgctgcagcgtctccttcccgttctccaggtatctgcggagccactccacgcacgtgccctccagg

SEQ ID NO: 1107 - DNA, 201 bp, Homo sapiens
ccaggtaggctctcaactgctccgccacacgggccgcctcccacttgcgctgggtgatctgagccgccatgtccgccgcggtccaagagcgcaggtcctckttcaaggcgatgtaatccttgccgtcgtaggcgtcctgccggtacccgcggaggaagcgcccgtccgaccccacgtcgcagccatacatcatctggatgg

SEQ ID NO: 1108 - DNA, 201 bp, Homo sapiens
gtgatcacagctccaaagagaaccaggccagcaatgatgcccacgatggggatggtgggctgggaagacggctcccatctcagggtgaggggcttgggcaraccctcatgctgcacatggcaggtgtatctctgctcctgtccagaaggcaccaccacagccgcccacttctggaaggttccatcccctgcaggcctggtc

SEQ ID NO: 1109 - DNA, 201 bp, Homo sapiens
caggcctggtctccacgagctccgtgtcctgggtctggtcctccccatcccgctgccaggtcagtgtgatctccgcagggtagaagctcagggcccagcayctcagggtggcttcatggtcagagacagcgtggtgagtcatatgcgttttgggggcgtccgtgcgctgcagcgtctccttcccgttctccaggtatctgc

SEQ ID NO: 1110 - DNA, 201 bp, Homo sapiens
ccccgctacttctgtgccaagcgctctgtctcaacgtttccgagtcttggcccaggagctgtctgagaaaccagggagaaaccctcgaaatgggccccgtbcctctctcttcactttgcatcacggaatccccgtcccagaactggactccctgcctcctactccttacctgtccccgtggactcttctagaagaaaaatc

SEQ ID NO: 1111 - DNA, 201 bp, Homo sapiens
gttccatcccctgcaggcctggtctccacgagctccgtgtcctgggtctggtcctccccatcccgctgccaggtcagtgtgatctccgcagggtagaagcycagggcccagcacctcagggtggcttcatggtcagagacagcgtggtgagtcatatgcgttttgggggcgtccgtgcgctgcagcgtctccttcccgttc

SEQ ID NO: 1112 - DNA, 201 bp, Homo sapiens
caggaatctaatcggccaaaaatgtgactttggtcccttgacatataaatgtgtctaaaagcattacaacaggaatcacaaagctcctaagtttcactttyccagacaatgtatctgtgactcccgcttgtagtattttaaatttaccttcattccatagccctgagtttctgtgtgagtccaggacatctcctaatacaa

SEQ ID NO: 1113 - DNA, 201 bp, Homo sapiens
gacttcgccctgaccccgctacttctgtgccaagcgctctgtctcaacgtttccgagtcttggcccaggagctgtctgagaaaccagggagaaaccctcgraatgggccccgttcctctctcttcactttgcatcacggaatccccgtcccagaactggactccctgcctcctactccttacctgtccccgtggactcttc

SEQ ID NO: 1114 - DNA, 201 bp, Homo sapiens
ccatacaccgcctttggggcctgagatcctgagagccatgcctgaggccctgggacttcgccctgaccccgctacttctgtgccaagcgctctgtctcaamgtttccgagtcttggcccaggagctgtctgagaaaccagggagaaaccctcgaaatgggccccgttcctctctcttcactttgcatcacggaatccccgt

SEQ ID NO: 1115 - DNA, 201 bp, Homo sapiens
catgctgcacatggcaggtgtatctctgctcctgtccagaaggcaccaccacagccgcccacttctggaaggttccatcccctgcaggcctggtctccacragctccgtgtcctgggtctggtcctccccatcccgctgccaggtcagtgtgatctccgcagggtagaagctcagggcccagcacctcagggtggcttcat

SEQ ID NO: 1116 - DNA, 201 bp, Homo sapiens
tgggagagggagaagagaaaccctgcggagatggggaatccccagcgctgggcctccccaatccatacaccgcctttggggcctgagatcctgagagccakgcctgaggccctgggacttcgccctgaccccgctacttctgtgccaagcgctctgtctcaacgtttccgagtcttggcccaggagctgtctgagaaacca

SEQ ID NO: 1117 - DNA, 201 bp, Homo sapiens
tcagggtgaggggcttgggcaaaccctcatgctgcacatggcaggtgtatctctgctcctgtccagaaggcaccaccacagccgcccacttctggaaggtyccatcccctgcaggcctggtctccacgagctccgtgtcctgggtctggtcctccccatcccgctgccaggtcagtgtgatctccgcagggtagaagctca

SEQ ID NO: 1118 - DNA, 201 bp, Homo sapiens
cccacttgcgctgggtgatctgagccgccatgtccgccgcggtccaagagcgcaggtcctcgttcaaggcgatgtaatccttgccgtcgtaggcgtcctgscggtacccgcggaggaagcgcccgtccgaccccacgtcgcagccatacatcatctggatgggtgttagaccctggccccgcccccgctgtcagccccgcc

SEQ ID NO: 1119 - DNA, 201 bp, Homo sapiens
caatgggagtgagaactggggcagcctggtgagtatccaggaagaaggacccgacacaggttgggagagggagaagagaaaccctgcggagatggggaatscccagcgctgggcctccccaatccatacaccgcctttggggcctgagatcctgagagccatgcctgaggccctgggacttcgccctgaccccgctacttc

SEQ ID NO: 1120 - DNA, 201 bp, Homo sapiens
ggaagacggctcccatctcagggtgaggggcttgggcaaaccctcatgctgcacatggcaggtgtatctctgctcctgtccagaaggcaccaccacagccrcccacttctggaaggttccatcccctgcaggcctggtctccacgagctccgtgtcctgggtctggtcctccccatcccgctgccaggtcagtgtgatctc

SEQ ID NO: 1121 - DNA, 201 bp, Homo sapiens
gaacccgacactcaatgggagtgagaactggggcagcctggtgagtatccaggaagaaggacccgacacaggttgggagagggagaagagaaaccctgcgragatggggaatccccagcgctgggcctccccaatccatacaccgcctttggggcctgagatcctgagagccatgcctgaggccctgggacttcgccctga

SEQ ID NO: 1122 - DNA, 201 bp, Homo sapiens
tgggaagacggctcccatctcagggtgaggggcttgggcaaaccctcatgctgcacatggcaggtgtatctctgctcctgtccagaaggcaccaccacagmcgcccacttctggaaggttccatcccctgcaggcctggtctccacgagctccgtgtcctgggtctggtcctccccatcccgctgccaggtcagtgtgatc

SEQ ID NO: 1123 - DNA, 201 bp, Homo sapiens
gcctgagtgcatgagatagaatagagaccagtttgctttttgtttattaactacagtgggtagcagaatcttggtaactcctaatgatcaggaatctaatbggccaaaaatgtgactttggtcccttgacatataaatgtgtctaaaagcattacaacaggaatcacaaagctcctaagtttcactttcccagacaatgta

SEQ ID NO: 1124 - DNA, 201 bp, Homo sapiens
ccgtggactcttctagaagaaaaatcactccagggagcttgttgccagagagtgagcttgccctgggaatggaggtgtagagacagggttttttgttgttrttgtttgtttgttttttaaatctggaaaagttgtgcctgagtgcatgagatagaatagagaccagtttgctttttgtttattaactacagtgggtagcag

SEQ ID NO: 1125 - DNA, 201 bp, Homo sapiens
ggaacccgacactcaatgggagtgagaactggggcagcctggtgagtatccaggaagaaggacccgacacaggttgggagagggagaagagaaaccctgcrgagatggggaatccccagcgctgggcctccccaatccatacaccgcctttggggcctgagatcctgagagccatgcctgaggccctgggacttcgccctg

SEQ ID NO: 1126 - DNA, 201 bp, Homo sapiens
ggatggtgggctgggaagacggctcccatctcagggtgaggggcttgggcaaaccctcatgctgcacatggcaggtgtatctctgctcctgtccagaaggyaccaccacagccgcccacttctggaaggttccatcccctgcaggcctggtctccacgagctccgtgtcctgggtctggtcctccccatcccgctgccagg

SEQ ID NO: 1127 - DNA, 201 bp, Homo sapiens
gcctcccacttgcgctgggtgatctgagccgccatgtccgccgcggtccaagagcgcaggtcctcgttcaaggcgatgtaatccttgccgtcgtaggcgtmctgccggtacccgcggaggaagcgcccgtccgaccccacgtcgcagccatacatcatctggatgggtgttagaccctggccccgcccccgctgtcagccc

SEQ ID NO: 1128 - DNA, 201 bp, Homo sapiens
gtcagggttcttcaagtcacaaagggaagggcaggaacaactcttgcctctcagtcccacacaaggcagctgtctcacactttacaagctgtgagagacayatcagagccctgggcactgtcactgcttgcagcctgagtcctcctccacctcacagcagcgaccacagctccagtgatcacagctccaaagagaaccagg

SEQ ID NO: 1129 - DNA, 201 bp, Homo sapiens; identical to SEQ ID NO: 1038

SEQ ID NO: 1130 - DNA, 201 bp, Homo sapiens; identical to SEQ ID NO: 1039

SEQ ID NO: 1131 - DNA, 201 bp, Homo sapiens; identical to SEQ ID NO: 1040

SEQ ID NO: 1132 - DNA, 201 bp, Homo sapiens; identical to SEQ ID NO: 1042

SEQ ID NO: 1133 - DNA, 201 bp, Homo sapiens; identical to SEQ ID NO: 1043

SEQ ID NO: 1134 - DNA, 201 bp, Homo sapiens; identical to SEQ ID NO: 1087

SEQ ID NO: 1135 - DNA, 201 bp, Homo sapiens; identical to SEQ ID NO: 1044

SEQ ID NO: 1136 - DNA, 201 bp, Homo sapiens; identical to SEQ ID NO: 1089

SEQ ID NO: 1137 - DNA, 201 bp, Homo sapiens; identical to SEQ ID NO: 1045

SEQ ID NO: 1138 - DNA, 201 bp, Homo sapiens; identical to SEQ ID NO: 1088

SEQ ID NO: 1139 - DNA, 201 bp, Homo sapiens; identical to SEQ ID NO: 1046

SEQ ID NO: 1140 - DNA, 201 bp, Homo sapiens; identical to SEQ ID NO: 1047

SEQ ID NO: 1141 - DNA, 201 bp, Homo sapiens; identical to SEQ ID NO: 1048

SEQ ID NO: 1142 - DNA, 201 bp, Homo sapiens; identical to SEQ ID NO: 1049

SEQ ID NO: 1143 - DNA, 201 bp, Homo sapiens; identical to SEQ ID NO: 1050

SEQ ID NO: 1144 - DNA, 201 bp, Homo sapiens; identical to SEQ ID NO: 1051

SEQ ID NO: 1145 - DNA, 201 bp, Homo sapiens; identical to SEQ ID NO: 1052

SEQ ID NO: 1146 - DNA, 201 bp, Homo sapiens; identical to SEQ ID NO: 1053

SEQ ID NO: 1147 - DNA, 201 bp, Homo sapiens; identical to SEQ ID NO: 1054

SEQ ID NO: 1148 - DNA, 201 bp, Homo sapiens; identical to SEQ ID NO: 1093

SEQ ID NO: 1149 - DNA, 201 bp, Homo sapiens; identical to SEQ ID NO: 1094

SEQ ID NO: 1150 - DNA, 201 bp, Homo sapiens; identical to SEQ ID NO: 1097

SEQ ID NO: 1151 - DNA, 201 bp, Homo sapiens; identical to SEQ ID NO: 1099

SEQ ID NO: 1152 - DNA, 201 bp, Homo sapiens; identical to SEQ ID NO: 1057

SEQ ID NO: 1153 - DNA, 201 bp, Homo sapiens; identical to SEQ ID NO: 1100

SEQ ID NO: 1154 - DNA, 201 bp, Homo sapiens; identical to SEQ ID NO: 1103

SEQ ID NO: 1155 - DNA, 201 bp, Homo sapiens; identical to SEQ ID NO: 1105

SEQ ID NO: 1156 - DNA, 199 bp, Homo sapiens
ccgtgcgctgcagcgtctccttcccgttctccaggtatctgcggagccactccacgcacgtgccctccaggtaggctctcaactgctccgccacacggrccgcctcccacttgcgctgggtgatctgagccgccatgtccgccgcggtccaagagcgcaggtcctcgttcaaggcgatgtaatccttgccgtcgtaggc

SEQ ID NO: 1157 - DNA, 196 bp, Homo sapiens
ccgtgcgctgcagcgtctccttcccgttctccaggtatctgcggagccactccacgcacgtgccctccaggtaggctctcaactgctccgccacaygggccgcctcccacttgcgctgggtgatctgagccgccatgtccgccgcggtccaagagcgcaggtcctcgttcaaggcgatgtaatccttgccgtcgta

SEQ ID NO: 1158 - DNA, 201 bp, Homo sapiens; identical to SEQ ID NO: 1107

SEQ ID NO: 1159 - DNA, 194 bp, Homo sapiens
ccgtgcgctgcagcgtctccttcccgttctccaggtatctgcggagccactccacgcacgtgccctccaggtaggctctcaactgctccgccasacgggccgcctcccacttgcgctgggtgatctgagccgccatgtccgccgcggtccaagagcgcaggtcctcgttcaaggcgatgtaatccttgccgtcg

SEQ ID NO: 1160 - DNA, 193 bp, Homo sapiens
ccgtgcgctgcagcgtctccttcccgttctccaggtatctgcggagccactccacgcacgtgccctccaggtaggctctcaactgctccgccdcacgggccgcctcccacttgcgctgggtgatctgagccgccatgtccgccgcggtccaagagcgcaggtcctcgttcaaggcgatgtaatccttgccgtc

SEQ ID NO: 1161 - DNA, 175 bp, Homo sapiens
ccgtgcgctgcagcgtctccttcccgttctccaggtatctgcggagccactccacgcacgtgccctccaggtagrctctcaactgctccgccacacgggccgcctcccacttgcgctgggtgatctgagccgccatgtccgccgcggtccaagagcgcaggtcctcgttcaaggc

SEQ ID NO: 1162 - DNA, 201 bp, Homo sapiens; identical to SEQ ID NO: 1112

SEQ ID NO: 1163 - DNA, 201 bp, Homo sapiens; identical to SEQ ID NO: 1110

SEQ ID NO: 1164 - DNA, 165 bp, Homo sapiens
ccgtgcgctgcagcgtctccttcccgttctccaggtatctgcggagccactccacgcacgtgccmtccaggtaggctctcaactgctccgccacacgggccgcctcccacttgcgctgggtgatctgagccgccatgtccgccgcggtccaagagcgcaggtcct

SEQ ID NO: 1165 - DNA, 201 bp, Homo sapiens; identical to SEQ ID NO: 1113

SEQ ID NO: 1166 - DNA, 201 bp, Homo sapiens; identical to SEQ ID NO: 1114

SEQ ID NO: 1167 - DNA, 201 bp, Homo sapiens; identical to SEQ ID NO: 1118

SEQ ID NO: 1168 - DNA, 201 bp, Homo sapiens; identical to SEQ ID NO: 1116

SEQ ID NO: 1169 - DNA, 201 bp, Homo sapiens; identical to SEQ ID NO: 1119

SEQ ID NO: 1170 - DNA, 201 bp, Homo sapiens; identical to SEQ ID NO: 1121

SEQ ID NO: 1171 - DNA, 201 bp, Homo sapiens; identical to SEQ ID NO: 1123

SEQ ID NO: 1172 - DNA, 201 bp, Homo sapiens; identical to SEQ ID NO: 1125

SEQ ID NO: 1173 - DNA, 201 bp, Homo sapiens; identical to SEQ ID NO: 1124

SEQ ID NO: 1174 - DNA, 201 bp, Homo sapiens; identical to SEQ ID NO: 1074

SEQ ID NO: 1175 - DNA, 201 bp, Homo sapiens; identical to SEQ ID NO: 1075

SEQ ID NO: 1176 - DNA, 201 bp, Homo sapiens; identical to SEQ ID NO: 1076

SEQ ID NO: 1177 - DNA, 201 bp, Homo sapiens; identical to SEQ ID NO: 1078

SEQ ID NO: 1178 - DNA, 201 bp, Homo sapiens; identical to SEQ ID NO: 1127

SEQ ID NO: 1179 - DNA, 201 bp, Homo sapiens
tggtcgctgctgtgaggtggaggaggaagagctcagatagaaaaggagggagctactctcaggctgcaagcagtgacagtgcccagggctctgatgtgtcyctcacagcttgtaaagtgtgagacagctgccttgtgtgggactgagaggcaagagttgttcctgcccttccctttgtgacttgaagaaccctgactttgt

SEQ ID NO: 1180 - DNA, 201 bp, Homo sapiens
tgaccgagcgaacctggggaccctgcgcggctactacaaccagagcgaggccggttctcacaccatccagatgatgtatggctgcgacgtggggtcggackggcgcttcctccgcgggtaccggcaggacgcctacgacggcaaggattacatcgccttgaacgaggacctgcgctcttggaccgcggcggacatggcggc

SEQ ID NO: 1181 - DNA, 201 bp, Homo sapiens
agcgaacctggggaccctgcgcggctactacaaccagagcgaggccggttctcacaccatccagatgatgtatggctgcgacgtggggtcggacgggcgcytcctccgcgggtaccggcaggacgcctacgacggcaaggattacatcgccttgaacgaggacctgcgctcttggaccgcggcggacatggcggctcagat

SEQ ID NO: 1182 - DNA, 201 bp, Homo sapiens
gggtttgcccaagcccctcaccctgagatgggagccgtcttcccagcccaccatccccatcgtgggcatcattgctggcctggttctctttggagctgtgwtcactggagctgtggtcgctgctgtgaggtggaggaggaagagctcagatagaaaaggagggagctactctcaggctgcaagcagtgacagtgcccaggg

SEQ ID NO: 1183 - DNA, 201 bp, Homo sapiens
ctgcgcggctactacaaccagagcgaggccggttctcacaccatccagatgatgtatggctgcgacgtggggtcggacgggcgcttcctccgcgggtaccrgcaggacgcctacgacggcaaggattacatcgccttgaacgaggacctgcgctcttggaccgcggcggacatggcggctcagatcacccagcgcaagtgg

SEQ ID NO: 1184 - DNA, 201 bp, Homo sapiens
tcacaccatccagatgatgtatggctgcgacgtggggtcggacgggcgcttcctccgcgggtaccggcaggacgcctacgacggcaaggattacatcgccytgaacgaggacctgcgctcttggaccgcggcggacatggcggctcagatcacccagcgcaagtgggaggcggcccgtgtggcggagcagttgagagccta

SEQ ID NO: 1185 - DNA, 201 bp, Homo sapiens
acgggcgcttcctccgcgggtaccggcaggacgcctacgacggcaaggattacatcgccttgaacgaggacctgcgctcttggaccgcggcggacatggcrgctcagatcacccagcgcaagtgggaggcggcccgtgtggcggagcagttgagagcctacctggagggcacgtgcgtggagtggctccgcagatacctgg

SEQ ID NO: 1186 - DNA, 201 bp, Homo sapiens
cctgcagacacggaatgtgaaggcccagtcacagactgaccgagcgaacctggggaccctgcgcggctactacaaccagagcgaggccggttctcacaccrtccagatgatgtatggctgcgacgtggggtcggacgggcgcttcctccgcgggtaccggcaggacgcctacgacggcaaggattacatcgccttgaacga

SEQ ID NO: 1187 - DNA, 201 bp, Homo sapiens
ttcctccgcgggtaccggcaggacgcctacgacggcaaggattacatcgccttgaacgaggacctgcgctcttggaccgcggcggacatggcggctcagaycacccagcgcaagtgggaggcggcccgtgtggcggagcagttgagagcctacctggagggcacgtgcgtggagtggctccgcagatacctggagaacggg

SEQ ID NO: 1188 - DNA, 201 bp, Homo sapiens
ccgcgggtaccggcaggacgcctacgacggcaaggattacatcgccttgaacgaggacctgcgctcttggaccgcggcggacatggcggctcagatcaccmagcgcaagtgggaggcggcccgtgtggcggagcagttgagagcctacctggagggcacgtgcgtggagtggctccgcagatacctggagaacgggaagga

SEQ ID NO: 1189 - DNA, 201 bp, Homo sapiens
gggtaccggcaggacgcctacgacggcaaggattacatcgccttgaacgaggacctgcgctcttggaccgcggcggacatggcggctcagatcacccagcrcaagtgggaggcggcccgtgtggcggagcagttgagagcctacctggagggcacgtgcgtggagtggctccgcagatacctggagaacgggaaggagacg

SEQ ID NO: 1190 - DNA, 201 bp, Homo sapiens
ggacgcctacgacggcaaggattacatcgccttgaacgaggacctgcgctcttggaccgcggcggacatggcggctcagatcacccagcgcaagtgggagrcggcccgtgtggcggagcagttgagagcctacctggagggcacgtgcgtggagtggctccgcagatacctggagaacgggaaggagacgctgcagcgcac

SEQ ID NO: 1191 - DNA, 201 bp, Homo sapiens
ggatggggaggaccagacccaggacacggagctcgtggagaccaggcctgcaggggatggaaccttccagaagtgggcggctgtggtggtgccttctggavaggagcagagatacacctgccatgtgcagcatgagggtttgcccaagcccctcaccctgagatgggagccgtcttcccagcccaccatccccatcgtggg

SEQ ID NO: 1192 - DNA, 201 bp, Homo sapiens
ggaggaccagacccaggacacggagctcgtggagaccaggcctgcaggggatggaaccttccagaagtgggcggctgtggtggtgccttctggacaggagmagagatacacctgccatgtgcagcatgagggtttgcccaagcccctcaccctgagatgggagccgtcttcccagcccaccatccccatcgtgggcatcat

SEQ ID NO: 1193 - DNA, 201 bp, Homo sapiens
gacgacacgcagttcgtgcggtttgacagcgacgccgcgagccagaggatggagccgcgggcaccgtggatagagcaggaggggccggagtattgggaccrgcagacacggaatgtgaaggcccagtcacagactgaccgagcgaacctggggaccctgcgcggctactacaaccagagcgaggccggttctcacaccatc

SEQ ID NO: 1194 - DNA, 201 bp, Homo sapiens
acacgcagttcgtgcggtttgacagcgacgccgcgagccagaggatggagccgcgggcaccgtggatagagcaggaggggccggagtattgggacctgcasacacggaatgtgaaggcccagtcacagactgaccgagcgaacctggggaccctgcgcggctactacaaccagagcgaggccggttctcacaccatccaga

SEQ ID NO: 1195 - DNA, 201 bp, Homo sapiens
gcagttcgtgcggtttgacagcgacgccgcgagccagaggatggagccgcgggcaccgtggatagagcaggaggggccggagtattgggacctgcagacasggaatgtgaaggcccagtcacagactgaccgagcgaacctggggaccctgcgcggctactacaaccagagcgaggccggttctcacaccatccagatgat

SEQ ID NO: 1196 - DNA, 201 bp, Homo sapiens
tcgtgcggtttgacagcgacgccgcgagccagaggatggagccgcgggcaccgtggatagagcaggaggggccggagtattgggacctgcagacacggaawgtgaaggcccagtcacagactgaccgagcgaacctggggaccctgcgcggctactacaaccagagcgaggccggttctcacaccatccagatgatgtatg

SEQ ID NO: 1197 - DNA, 201 bp, Homo sapiens
cgtgcggtttgacagcgacgccgcgagccagaggatggagccgcgggcaccgtggatagagcaggaggggccggagtattgggacctgcagacacggaatrtgaaggcccagtcacagactgaccgagcgaacctggggaccctgcgcggctactacaaccagagcgaggccggttctcacaccatccagatgatgtatgg

SEQ ID NO: 1198 - DNA, 201 bp, Homo sapiens
ccaccgggactcagattctccccagacgccgaggatggccgtcatggcgccccgaaccctcctcctgctactcttgggggccctggccctgacccagaccwgggcgggctcccactccatgaggtatttcaccacatccgtgtcccggcccggccgcggggagccccgcttcatcgccgtgggctacgtggacgacacgca

SEQ ID NO: 1199 - DNA, 201 bp, Homo sapiens
tgtgacttgaagaaccctgactttgtttctgcaaaggcacctgcatgtgtctgtgttcgtgtaggcataatgtgaggaggtggggagaccaccccaccccsatgtccaccatgaccctcttcccacgctgacctgtgctccctccccaatcatctttcctgttccagagaggtggggctgaggtgtctccatctctgtctc

SEQ ID NO: 1200 - DNA, 201 bp, Homo sapiens
ctctcaggctgcaagcagtgacagtgcccagggctctgatgtgtctctcacagcttgtaaagtgtgagacagctgccttgtgtgggactgagaggcaagakttgttcctgcccttccctttgtgacttgaagaaccctgactttgtttctgcaaaggcacctgcatgtgtctgtgttcgtgtaggcataatgtgaggaggt

SEQ ID NO: 1201 - DNA, 201 bp, Homo sapiens
  misc_feature (1)...(201): n = A,T,C or G, or insertion/deletion polymorphism (see Tables 1-2)
tgtgtgggactgagaggcaagagttgttcctgcccttccctttgtgacttgaagaaccctgactttgtttctgcaaaggcacctgcatgtgtctgtgttcntgtaggcataatgtgaggaggtggggagaccaccccacccccatgtccaccatgaccctcttcccacgctgacctgtgctccctccccaatcatctttcc

SEQ ID NO: 1202 - DNA, 201 bp, Homo sapiens
ccccatgtccaccatgaccctcttcccacgctgacctgtgctccctccccaatcatctttcctgttccagagaggtggggctgaggtgtctccatctctgyctcaacttcatggtgcactgagctgtaacttcttccttccctattaaaattagaacctgagtataaatttactttctcaaattcttgccatgagaggttg

SEQ ID NO: 1203 - DNA, 201 bp, Homo sapiens
gcctacgacggcaaggattacatcgccttgaacgaggacctgcgctcttggaccgcggcggacatggcggctcagatcacccagcgcaagtgggaggcggyccgtgtggcggagcagttgagagcctacctggagggcacgtgcgtggagtggctccgcagatacctggagaacgggaaggagacgctgcagcgcacggac

SEQ ID NO: 1204 - DNA, 201 bp, Homo sapiens
gacctgtgctccctccccaatcatctttcctgttccagagaggtggggctgaggtgtctccatctctgtctcaacttcatggtgcactgagctgtaacttyttccttccctattaaaattagaacctgagtataaatttactttctcaaattcttgccatgagaggttgatgagttaattaaaggagaagattcctaaaat

SEQ ID NO: 1205 - DNA, 101 bp, Homo sapiens
mgcttggcacagaagcagaggggtcagggcgaagtcccagggccccaggcgtggctctcagggtctcaggccccgaaggcggtgtatggattggggagtcc

SEQ ID NO: 1206 - DNA, 201 bp, Homo sapiens
tcctgttccagagaggtggggctgaggtgtctccatctctgtctcaacttcatggtgcactgagctgtaacttcttccttccctattaaaattagaacctkagtataaatttactttctcaaattcttgccatgagaggttgatgagttaattaaaggagaagattcctaaaatttgagagacaaaataaatggaacacat

SEQ ID NO: 1207 - DNA, 113 bp, Homo sapiens
cgcttggcacagragcagaggggtcagggcgaagtcccagggccccaggcgtggctctcagggtctcaggccccgaaggcggtgtatggattggggagtcccagccttgggga

SEQ ID NO: 1208 - DNA, 201 bp, Homo sapiens
tacgacggcaaggattacatcgccttgaacgaggacctgcgctcttggaccgcggcggacatggcggctcagatcacccagcgcaagtgggaggcggcccrtgtggcggagcagttgagagcctacctggagggcacgtgcgtggagtggctccgcagatacctggagaacgggaaggagacgctgcagcgcacggacgcc

SEQ ID NO: 1209 - DNA, 198 bp, Homo sapiens
gaggtggggctgaggtgtctccatctctgtctcaacttcatggtgcactgagctgtaacttcttccttccctattaaaattagaacctgagtataaatttmctttctcaaattcttgccatgagaggttgatgagttaattaaaggagaagattcctaaaatttgagagacaaaataaatggaacacatgagaacctt

SEQ ID NO: 1210 - DNA, 201 bp, Homo sapiens
cgacggcaaggattacatcgccttgaacgaggacctgcgctcttggaccgcggcggacatggcggctcagatcacccagcgcaagtgggaggcggcccgtstggcggagcagttgagagcctacctggagggcacgtgcgtggagtggctccgcagatacctggagaacgggaaggagacgctgcagcgcacggacgcccc

SEQ ID NO: 1211 - DNA, 201 bp, Homo sapiens
gacggcaaggattacatcgccttgaacgaggacctgcgctcttggaccgcggcggacatggcggctcagatcacccagcgcaagtgggaggcggcccgtghggcggagcagttgagagcctacctggagggcacgtgcgtggagtggctccgcagatacctggagaacgggaaggagacgctgcagcgcacggacgccccc

SEQ ID NO: 1212 - DNA, 201 bp, Homo sapiens
gccttgaacgaggacctgcgctcttggaccgcggcggacatggcggctcagatcacccagcgcaagtgggaggcggcccgtgtggcggagcagttgagagyctacctggagggcacgtgcgtggagtggctccgcagatacctggagaacgggaaggagacgctgcagcgcacggacgcccccaaaacgcatatgactcac

SEQ ID NO: 1213 - DNA, 122 bp, Homo sapiens
aaattagaacctgagtataaatttactttctcaaattcttgccatgagaggttgatgagttaattaaaggagaagattcctaaaatttgagagacaaaatwaatggaacacatgagaacctt

SEQ ID NO: 1214 - DNA, 201 bp, Homo sapiens
aggacctgcgctcttggaccgcggcggacatggcggctcagatcacccagcgcaagtgggaggcggcccgtgtggcggagcagttgagagcctacctggakggcacgtgcgtggagtggctccgcagatacctggagaacgggaaggagacgctgcagcgcacggacgcccccaaaacgcatatgactcaccacgctgtct

SEQ ID NO: 1215 - DNA, 114 bp, Homo sapiens
acctgagtataaatttactttctcaaattcttgccatgagaggttgatgagttaattaaaggagaagattcctaaaatttgagagacaaaataaatggaasacatgagaacctt

SEQ ID NO: 1216 - DNA, 201 bp, Homo sapiens
aagtgggcggctgtggtggtgccttctggacaggagcagagatacacctgccatgtgcagcatgagggtttgcccaagcccctcaccctgagatgggagcygtcttcccagcccaccatccccatcgtgggcatcattgctggcctggttctctttggagctgtgatcactggagctgtggtcgctgctgtgaggtggagg

SEQ ID NO: 1217 - DNA, 201 bp, Homo sapiens
tccgtgtcccggcccggccgcggggagccccgcttcatcgccgtgggctacgtggacgacacgcagttcgtgcggtttgacagcgacgccgcgagccagargatggagccgcgggcaccgtggatagagcaggaggggccggagtattgggacctgcagacacggaatgtgaaggcccagtcacagactgaccgagcgaac

SEQ ID NO: 1218 - DNA, 201 bp, Homo sapiens
tgcggtttgacagcgacgccgcgagccagaggatggagccgcgggcaccgtggatagagcaggaggggccggagtattgggacctgcagacacggaatgtsaaggcccagtcacagactgaccgagcgaacctggggaccctgcgcggctactacaaccagagcgaggccggttctcacaccatccagatgatgtatggct

SEQ ID NO: 1219 - DNA, 201 bp, Homo sapiens
acagcgacgccgcgagccagaggatggagccgcgggcaccgtggatagagcaggaggggccggagtattgggacctgcagacacggaatgtgaaggcccastcacagactgaccgagcgaacctggggaccctgcgcggctactacaaccagagcgaggccggttctcacaccatccagatgatgtatggctgcgacgtgg

SEQ ID NO: 1220 - DNA, 201 bp, Homo sapiens
cagcgacgccgcgagccagaggatggagccgcgggcaccgtggatagagcaggaggggccggagtattgggacctgcagacacggaatgtgaaggcccagkcacagactgaccgagcgaacctggggaccctgcgcggctactacaaccagagcgaggccggttctcacaccatccagatgatgtatggctgcgacgtggg

SEQ ID NO: 1221 - DNA, 201 bp, Homo sapiens
tgcccagggctctgatgtgtctctcacagcttgtaaagtgtgagacagctgccttgtgtgggactgagaggcaagagttgttcctgcccttccctttgtgrcttgaagaaccctgactttgtttctgcaaaggcacctgcatgtgtctgtgttcgtgtaggcataatgtgaggaggtggggagaccaccccacccccatgt

SEQ ID NO: 1222 - DNA, 201 bp, Homo sapiens
gccgcgagccagaggatggagccgcgggcaccgtggatagagcaggaggggccggagtattgggacctgcagacacggaatgtgaaggcccagtcacagaytgaccgagcgaacctggggaccctgcgcggctactacaaccagagcgaggccggttctcacaccatccagatgatgtatggctgcgacgtggggtcggac

SEQ ID NO: 1223 - DNA, 201 bp, Homo sapiens
cgcgagccagaggatggagccgcgggcaccgtggatagagcaggaggggccggagtattgggacctgcagacacggaatgtgaaggcccagtcacagactsaccgagcgaacctggggaccctgcgcggctactacaaccagagcgaggccggttctcacaccatccagatgatgtatggctgcgacgtggggtcggacgg

SEQ ID NO: 1224 - DNA, 201 bp, Homo sapiens
cagaggatggagccgcgggcaccgtggatagagcaggaggggccggagtattgggacctgcagacacggaatgtgaaggcccagtcacagactgaccgaghgaacctggggaccctgcgcggctactacaaccagagcgaggccggttctcacaccatccagatgatgtatggctgcgacgtggggtcggacgggcgcttc

SEQ ID NO: 1225 - DNA, 201 bp, Homo sapiens
ggtgccttctggacaggagcagagatacacctgccatgtgcagcatgagggtttgcccaagcccctcaccctgagatgggagccgtcttcccagcccaccrtccccatcgtgggcatcattgctggcctggttctctttggagctgtgatcactggagctgtggtcgctgctgtgaggtggaggaggaagagctcagatag

SEQ ID NO: 1226 - DNA, 201 bp, Homo sapiens
cgtcatggcgccccgaaccctcctcctgctactcttgggggccctggccctgacccagacctgggcgggctcccactccatgaggtatttcaccacatccrtgtcccggcccggccgcggggagccccgcttcatcgccgtgggctacgtggacgacacgcagttcgtgcggtttgacagcgacgccgcgagccagaggat

SEQ ID NO: 1227 - DNA, 201 bp, Homo sapiens
cctgccatgtgcagcatgagggtttgcccaagcccctcaccctgagatgggagccgtcttcccagcccaccatccccatcgtgggcatcattgctggcctrgttctctttggagctgtgatcactggagctgtggtcgctgctgtgaggtggaggaggaagagctcagatagaaaaggagggagctactctcaggctgcaa

SEQ ID NO: 1228 - DNA, 201 bp, Homo sapiens
gggactcagattctccccagacgccgaggatggccgtcatggcgccccgaaccctcctcctgctactcttgggggccctggccctgacccagacctgggcrggctcccactccatgaggtatttcaccacatccgtgtcccggcccggccgcggggagccccgcttcatcgccgtgggctacgtggacgacacgcagttcg

SEQ ID NO: 1229 - DNA, 201 bp, Homo sapiens
tgagggtttgcccaagcccctcaccctgagatgggagccgtcttcccagcccaccatccccatcgtgggcatcattgctggcctggttctctttggagctrtgatcactggagctgtggtcgctgctgtgaggtggaggaggaagagctcagatagaaaaggagggagctactctcaggctgcaagcagtgacagtgccca

SEQ ID NO: 1230 - DNA, 201 bp, Homo sapiens
cagattctccccagacgccgaggatggccgtcatggcgccccgaaccctcctcctgctactcttgggggccctggccctgacccagacctgggcgggctcycactccatgaggtatttcaccacatccgtgtcccggcccggccgcggggagccccgcttcatcgccgtgggctacgtggacgacacgcagttcgtgcggt

SEQ ID NO: 1231 - DNA, 201 bp, Homo sapiens
tttgcccaagcccctcaccctgagatgggagccgtcttcccagcccaccatccccatcgtgggcatcattgctggcctggttctctttggagctgtgatcrctggagctgtggtcgctgctgtgaggtggaggaggaagagctcagatagaaaaggagggagctactctcaggctgcaagcagtgacagtgcccagggctc

SEQ ID NO: 1232 - DNA, 201 bp, Homo sapiens
caggcgtggctctcagggtctcaggccccgaaggcggtgtatggattggggagtcccagccttggggattccccaactccgcagtttcttttctccctctsccaacctatgtagggtccttcttcctggatactcacgacgcggacccagttctcactcccattgggtgtcgggtttccagagaagccaatcagtgtcgtc

SEQ ID NO: 1233 - DNA, 201 bp, Homo sapiens
gctctgatgtgtctctcacagcttgtaaagtgtgagacagctgccttgtgtgggactgagaggcaagagttgttcctgcccttccctttgtgacttgaagwaccctgactttgtttctgcaaaggcacctgcatgtgtctgtgttcgtgtaggcataatgtgaggaggtggggagaccaccccacccccatgtccaccatg

SEQ ID NO: 1234 - DNA, 201 bp, Homo sapiens
ttctaaagtccgcacgcacccaccgggactcagattctccccagacgccgaggatggccgtcatggcgccccgaaccctcctcctgctactcttgggggcyctggccctgacccagacctgggcgggctcccactccatgaggtatttcaccacatccgtgtcccggcccggccgcggggagccccgcttcatcgccgtgg

SEQ ID NO: 1235 - DNA, 201 bp, Homo sapiens
ttcttcctggatactcacgacgcggacccagttctcactcccattgggtgtcgggtttccagagaagccaatcagtgtcgtcgcggtcgcggttctaaagyccgcacgcacccaccgggactcagattctccccagacgccgaggatggccgtcatggcgccccgaaccctcctcctgctactcttgggggccctggccct

SEQ ID NO: 1236 - DNA, 201 bp, Homo sapiens
tgcccttccctttgtgacttgaagaaccctgactttgtttctgcaaaggcacctgcatgtgtctgtgttcgtgtaggcataatgtgaggaggtggggagascaccccacccccatgtccaccatgaccctcttcccacgctgacctgtgctccctccccaatcatctttcctgttccagagaggtggggctgaggtgtctc

SEQ ID NO: 1237 - DNA, 201 bp, Homo sapiens
gaggatggccgtcatggcgccccgaaccctcctcctgctactcttgggggccctggccctgacccagacctgggcgggctcccactccatgaggtatttcwccacatccgtgtcccggcccggccgcggggagccccgcttcatcgccgtgggctacgtggacgacacgcagttcgtgcggtttgacagcgacgccgcgag

SEQ ID NO: 1238 - DNA, 201 bp, Homo sapiens
cgggtttccagagaagccaatcagtgtcgtcgcggtcgcggttctaaagtccgcacgcacccaccgggactcagattctccccagacgccgaggatggccrtcatggcgccccgaaccctcctcctgctactcttgggggccctggccctgacccagacctgggcgggctcccactccatgaggtatttcaccacatccgt

SEQ ID NO: 1239 - DNA, 113 bp, Homo sapiens
cctgagtataaatttactttctcaaattcttgccatgagaggttgatgagttaattaaaggagaagattcctaaaatttgagagacaaaataaatggaacrcatgagaacctt

SEQ ID NO: 1240 - DNA, 201 bp, Homo sapiens
tccagagaagccaatcagtgtcgtcgcggtcgcggttctaaagtccgcacgcacccaccgggactcagattctccccagacgccgaggatggccgtcatgscgccccgaaccctcctcctgctactcttgggggccctggccctgacccagacctgggcgggctcccactccatgaggtatttcaccacatccgtgtcccg

SEQ ID NO: 1241 - DNA, 201 bp, Homo sapiens
aaccctcctcctgctactcttgggggccctggccctgacccagacctgggcgggctcccactccatgaggtatttcaccacatccgtgtcccggcccggcmgcggggagccccgcttcatcgccgtgggctacgtggacgacacgcagttcgtgcggtttgacagcgacgccgcgagccagaggatggagccgcgggcacc

SEQ ID NO: 1242 - DNA, 201 bp, Homo sapiens
cagagaagccaatcagtgtcgtcgcggtcgcggttctaaagtccgcacgcacccaccgggactcagattctccccagacgccgaggatggccgtcatggckccccgaaccctcctcctgctactcttgggggccctggccctgacccagacctgggcgggctcccactccatgaggtatttcaccacatccgtgtcccggc

SEQ ID NO: 1243 - DNA, 201 bp, Homo sapiens
tggagggcacgtgcgtggagtggctccgcagatacctggagaacgggaaggagacgctgcagcgcacggacgcccccaaaacgcatatgactcaccacgcygtctctgaccatgaagccaccctgaggtgctgggccctgagcttctaccctgcggagatcacactgacctggcagcgggatggggaggaccagacccagg

SEQ ID NO: 1244 - DNA, 201 bp, Homo sapiens
gttctaaagtccgcacgcacccaccgggactcagattctccccagacgccgaggatggccgtcatggcgccccgaaccctcctcctgctactcttgggggycctggccctgacccagacctgggcgggctcccactccatgaggtatttcaccacatccgtgtcccggcccggccgcggggagccccgcttcatcgccgtg

SEQ ID NO: 1245 - DNA, 201 bp, Homo sapiens
acagactgaccgagcgaacctggggaccctgcgcggctactacaaccagagcgaggccggttctcacaccatccagatgatgtatggctgcgacgtggggycggacgggcgcttcctccgcgggtaccggcaggacgcctacgacggcaaggattacatcgccttgaacgaggacctgcgctcttggaccgcggcggacat

SEQ ID NO: 1246 - DNA, 201 bp, Homo sapiens
acacggaatgtgaaggcccagtcacagactgaccgagcgaacctggggaccctgcgcggctactacaaccagagcgaggccggttctcacaccatccagakgatgtatggctgcgacgtggggtcggacgggcgcttcctccgcgggtaccggcaggacgcctacgacggcaaggattacatcgccttgaacgaggacctg

SEQ ID NO: 1247 - DNA, 201 bp, Homo sapiens
agcagttgagagcctacctggagggcacgtgcgtggagtggctccgcagatacctggagaacgggaaggagacgctgcagcgcacggacgcccccaaaacrcatatgactcaccacgctgtctctgaccatgaagccaccctgaggtgctgggccctgagcttctaccctgcggagatcacactgacctggcagcgggatg

SEQ ID NO: 1248 - DNA, 201 bp, Homo sapiens
gagcctacctggagggcacgtgcgtggagtggctccgcagatacctggagaacgggaaggagacgctgcagcgcacggacgcccccaaaacgcatatgacycaccacgctgtctctgaccatgaagccaccctgaggtgctgggccctgagcttctaccctgcggagatcacactgacctggcagcgggatggggaggacc

SEQ ID NO: 1249 - DNA, 201 bp, Homo sapiens
ggagggcacgtgcgtggagtggctccgcagatacctggagaacgggaaggagacgctgcagcgcacggacgcccccaaaacgcatatgactcaccacgctrtctctgaccatgaagccaccctgaggtgctgggccctgagcttctaccctgcggagatcacactgacctggcagcgggatggggaggaccagacccagga

SEQ ID NO: 1250 - DNA, 201 bp, Homo sapiens
cggagcagttgagagcctacctggagggcacgtgcgtggagtggctccgcagatacctggagaacgggaaggagacgctgcagcgcacggacgcccccaaracgcatatgactcaccacgctgtctctgaccatgaagccaccctgaggtgctgggccctgagcttctaccctgcggagatcacactgacctggcagcggg

SEQ ID NO: 1251 - DNA, 201 bp, Homo sapiens
tggagtggctccgcagatacctggagaacgggaaggagacgctgcagcgcacggacgcccccaaaacgcatatgactcaccacgctgtctctgaccatgargccaccctgaggtgctgggccctgagcttctaccctgcggagatcacactgacctggcagcgggatggggaggaccagacccaggacacggagctcgtgg

SEQ ID NO: 1252 - DNA, 201 bp, Homo sapiens
ggctccgcagatacctggagaacgggaaggagacgctgcagcgcacggacgcccccaaaacgcatatgactcaccacgctgtctctgaccatgaagccacyctgaggtgctgggccctgagcttctaccctgcggagatcacactgacctggcagcgggatggggaggaccagacccaggacacggagctcgtggagacca

SEQ ID NO: 1253 - DNA, 201 bp, Homo sapiens
gaggatggagccgcgggcaccgtggatagagcaggaggggccggagtattgggacctgcagacacggaatgtgaaggcccagtcacagactgaccgagcgracctggggaccctgcgcggctactacaaccagagcgaggccggttctcacaccatccagatgatgtatggctgcgacgtggggtcggacgggcgcttcct

SEQ ID NO: 1254 - DNA, 201 bp, Homo sapiens
cagtgtcgtcgcggtcgcggttctaaagtccgcacgcacccaccgggactcagattctccccagacgccgaggatggccgtcatggcgccccgaaccctcstcctgctactcttgggggccctggccctgacccagacctgggcgggctcccactccatgaggtatttcaccacatccgtgtcccggcccggccgcgggga

SEQ ID NO: 1255 - DNA, 201 bp, Homo sapiens
ggagccgcgggcaccgtggatagagcaggaggggccggagtattgggacctgcagacacggaatgtgaaggcccagtcacagactgaccgagcgaacctgsggaccctgcgcggctactacaaccagagcgaggccggttctcacaccatccagatgatgtatggctgcgacgtggggtcggacgggcgcttcctccgcgg

SEQ ID NO: 1256 - DNA, 201 bp, Homo sapiens
ccggagtattgggacctgcagacacggaatgtgaaggcccagtcacagactgaccgagcgaacctggggaccctgcgcggctactacaaccagagcgaggmcggttctcacaccatccagatgatgtatggctgcgacgtggggtcggacgggcgcttcctccgcgggtaccggcaggacgcctacgacggcaaggattac

SEQ ID NO: 1257 - DNA, 201 bp, Homo sapiens
aggatggccgtcatggcgccccgaaccctcctcctgctactcttgggggccctggccctgacccagacctgggcgggctcccactccatgaggtatttcahcacatccgtgtcccggcccggccgcggggagccccgcttcatcgccgtgggctacgtggacgacacgcagttcgtgcggtttgacagcgacgccgcgagc

SEQ ID NO: 1258 - DNA, 201 bp, Homo sapiens
cgacacgcagttcgtgcggtttgacagcgacgccgcgagccagaggatggagccgcgggcaccgtggatagagcaggaggggccggagtattgggacctgvagacacggaatgtgaaggcccagtcacagactgaccgagcgaacctggggaccctgcgcggctactacaaccagagcgaggccggttctcacaccatcca

SEQ ID NO: 1259 - DNA, 201 bp, Homo sapiens
actacaaccagagcgaggccggttctcacaccatccagatgatgtatggctgcgacgtggggtcggacgggcgcttcctccgcgggtaccggcaggacgcytacgacggcaaggattacatcgccttgaacgaggacctgcgctcttggaccgcggcggacatggcggctcagatcacccagcgcaagtgggaggcggccc

SEQ ID NO: 1260 - DNA, 201 bp, Homo sapiens
actccatgaggtatttcaccacatccgtgtcccggcccggccgcggggagccccgcttcatcgccgtgggctacgtggacgacacgcagttcgtgcggttygacagcgacgccgcgagccagaggatggagccgcgggcaccgtggatagagcaggaggggccggagtattgggacctgcagacacggaatgtgaaggccc

SEQ ID NO: 1261 - DNA, 201 bp, Homo sapiens
tggccgtcatggcgccccgaaccctcctcctgctactcttgggggccctggccctgacccagacctgggcgggctcccactccatgaggtatttcaccacmtccgtgtcccggcccggccgcggggagccccgcttcatcgccgtgggctacgtggacgacacgcagttcgtgcggtttgacagcgacgccgcgagccaga

SEQ ID NO: 1262 - DNA, 201 bp, Homo sapiens
tccctttgtgacttgaagaaccctgactttgtttctgcaaaggcacctgcatgtgtctgtgttcgtgtaggcataatgtgaggaggtggggagaccacccmacccccatgtccaccatgaccctcttcccacgctgacctgtgctccctccccaatcatctttcctgttccagagaggtggggctgaggtgtctccatctc

SEQ ID NO: 1263 - DNA, 201 bp, Homo sapiens
cacggaatgtgaaggcccagtcacagactgaccgagcgaacctggggaccctgcgcggctactacaaccagagcgaggccggttctcacaccatccagatratgtatggctgcgacgtggggtcggacgggcgcttcctccgcgggtaccggcaggacgcctacgacggcaaggattacatcgccttgaacgaggacctgc

SEQ ID NO: 1264 - DNA, 201 bp, Homo sapiens
atgtgtctgtgttcgtgtaggcataatgtgaggaggtggggagaccaccccacccccatgtccaccatgaccctcttcccacgctgacctgtgctccctcyccaatcatctttcctgttccagagaggtggggctgaggtgtctccatctctgtctcaacttcatggtgcactgagctgtaacttcttccttccctattaa

SEQ ID NO: 1265 - DNA, 201 bp, Homo sapiens
aatgtgaaggcccagtcacagactgaccgagcgaacctggggaccctgcgcggctactacaaccagagcgaggccggttctcacaccatccagatgatgtwtggctgcgacgtggggtcggacgggcgcttcctccgcgggtaccggcaggacgcctacgacggcaaggattacatcgccttgaacgaggacctgcgctct

SEQ ID NO: 1266 - DNA, 162 bp, Homo sapiens
cgcttggcacagaagcagaggggtcagggcgaagtcccagggccccaggcgtggctctcagrgtctcaggccccgaaggcggtgtatggattggggagtcccagccttggggattccccaactccgcagtttcttttctccctctcccaacctatgtagggt

SEQ ID NO: 1267 - DNA, 201 bp, Homo sapiens
ggcataatgtgaggaggtggggagaccaccccacccccatgtccaccatgaccctcttcccacgctgacctgtgctccctccccaatcatctttcctgttscagagaggtggggctgaggtgtctccatctctgtctcaacttcatggtgcactgagctgtaacttcttccttccctattaaaattagaacctgagtataa

SEQ ID NO: 1268 - DNA, 201 bp, Homo sapiens
ccctcctcctgctactcttgggggccctggccctgacccagacctgggcgggctcccactccatgaggtatttcaccacatccgtgtcccggcccggccgyggggagccccgcttcatcgccgtgggctacgtggacgacacgcagttcgtgcggtttgacagcgacgccgcgagccagaggatggagccgcgggcaccgt

SEQ ID NO: 1269 - DNA, 201 bp, Homo sapiens
cctggagggcacgtgcgtggagtggctccgcagatacctggagaacgggaaggagacgctgcagcgcacggacgcccccaaaacgcatatgactcaccacsctgtctctgaccatgaagccaccctgaggtgctgggccctgagcttctaccctgcggagatcacactgacctggcagcgggatggggaggaccagaccca

SEQ ID NO: 1270 - DNA, 201 bp, Homo sapiens
ccatccagatgatgtatggctgcgacgtggggtcggacgggcgcttcctccgcgggtaccggcaggacgcctacgacggcaaggattacatcgccttgaamgaggacctgcgctcttggaccgcggcggacatggcggctcagatcacccagcgcaagtgggaggcggcccgtgtggcggagcagttgagagcctacctgg

SEQ ID NO: 1271 - DNA, 201 bp, Homo sapiens
gacctgggcgggctcccactccatgaggtatttcaccacatccgtgtcccggcccggccgcggggagccccgcttcatcgccgtgggctacgtggacgacwcgcagttcgtgcggtttgacagcgacgccgcgagccagaggatggagccgcgggcaccgtggatagagcaggaggggccggagtattgggacctgcagac

SEQ ID NO: 1272 - DNA, 201 bp, Homo sapiens
gaccaggcctgcaggggatggaaccttccagaagtgggcggctgtggtggtgccttctggacaggagcagagatacacctgccatgtgcagcatgagggtytgcccaagcccctcaccctgagatgggagccgtcttcccagcccaccatccccatcgtgggcatcattgctggcctggttctctttggagctgtgatcac

SEQ ID NO: 1273 - DNA, 201 bp, Homo sapiens
tcccactccatgaggtatttcaccacatccgtgtcccggcccggccgcggggagccccgcttcatcgccgtgggctacgtggacgacacgcagttcgtgcrgtttgacagcgacgccgcgagccagaggatggagccgcgggcaccgtggatagagcaggaggggccggagtattgggacctgcagacacggaatgtgaag

SEQ ID NO: 1274 - DNA, 201 bp, Homo sapiens
gcagatacctggagaacgggaaggagacgctgcagcgcacggacgcccccaaaacgcatatgactcaccacgctgtctctgaccatgaagccaccctgagrtgctgggccctgagcttctaccctgcggagatcacactgacctggcagcgggatggggaggaccagacccaggacacggagctcgtggagaccaggcctg

SEQ ID NO: 1275 - DNA, 201 bp, Homo sapiens
gaacgggaaggagacgctgcagcgcacggacgcccccaaaacgcatatgactcaccacgctgtctctgaccatgaagccaccctgaggtgctgggccctgrgcttctaccctgcggagatcacactgacctggcagcgggatggggaggaccagacccaggacacggagctcgtggagaccaggcctgcaggggatggaac

SEQ ID NO: 1276 - DNA, 201 bp, Homo sapiens
catcgccgtgggctacgtggacgacacgcagttcgtgcggtttgacagcgacgccgcgagccagaggatggagccgcgggcaccgtggatagagcaggagrggccggagtattgggacctgcagacacggaatgtgaaggcccagtcacagactgaccgagcgaacctggggaccctgcgcggctactacaaccagagcga

SEQ ID NO: 1277 - DNA, 201 bp, Homo sapiens
atgaagccaccctgaggtgctgggccctgagcttctaccctgcggagatcacactgacctggcagcgggatggggaggaccagacccaggacacggagctygtggagaccaggcctgcaggggatggaaccttccagaagtgggcggctgtggtggtgccttctggacaggagcagagatacacctgccatgtgcagcatg

SEQ ID NO: 1278 - DNA, 201 bp, Homo sapiens
gggccctggccctgacccagacctgggcgggctcccactccatgaggtatttcaccacatccgtgtcccggcccggccgcggggagccccgcttcatcgcmgtgggctacgtggacgacacgcagttcgtgcggtttgacagcgacgccgcgagccagaggatggagccgcgggcaccgtggatagagcaggaggggccgg

SEQ ID NO: 1279 - DNA, 201 bp, Homo sapiens
tgagcttctaccctgcggagatcacactgacctggcagcgggatggggaggaccagacccaggacacggagctcgtggagaccaggcctgcaggggatggraccttccagaagtgggcggctgtggtggtgccttctggacaggagcagagatacacctgccatgtgcagcatgagggtttgcccaagcccctcaccctga

SEQ ID NO: 1280 - DNA, 201 bp, Homo sapiens
tgcgcggctactacaaccagagcgaggccggttctcacaccatccagatgatgtatggctgcgacgtggggtcggacgggcgcttcctccgcgggtaccgscaggacgcctacgacggcaaggattacatcgccttgaacgaggacctgcgctcttggaccgcggcggacatggcggctcagatcacccagcgcaagtggg

SEQ ID NO: 1281 - DNA, 201 bp, Homo sapiens
gagatcacactgacctggcagcgggatggggaggaccagacccaggacacggagctcgtggagaccaggcctgcaggggatggaaccttccagaagtgggyggctgtggtggtgccttctggacaggagcagagatacacctgccatgtgcagcatgagggtttgcccaagcccctcaccctgagatgggagccgtcttcc

SEQ ID NO: 1282 - DNA, 201 bp, Homo sapiens
gatcacactgacctggcagcgggatggggaggaccagacccaggacacggagctcgtggagaccaggcctgcaggggatggaaccttccagaagtgggcgkctgtggtggtgccttctggacaggagcagagatacacctgccatgtgcagcatgagggtttgcccaagcccctcaccctgagatgggagccgtcttccca

SEQ ID NO: 1283 - DNA, 201 bp, Homo sapiens
atcgccgtgggctacgtggacgacacgcagttcgtgcggtttgacagcgacgccgcgagccagaggatggagccgcgggcaccgtggatagagcaggaggrgccggagtattgggacctgcagacacggaatgtgaaggcccagtcacagactgaccgagcgaacctggggaccctgcgcggctactacaaccagagcgag

SEQ ID NO: 1284 - DNA, 201 bp, Homo sapiens
cctggcagcgggatggggaggaccagacccaggacacggagctcgtggagaccaggcctgcaggggatggaaccttccagaagtgggcggctgtggtggtrccttctggacaggagcagagatacacctgccatgtgcagcatgagggtttgcccaagcccctcaccctgagatgggagccgtcttcccagcccaccatcc

SEQ ID NO: 1285 - DNA, 201 bp, Homo sapiens
tcgccgtgggctacgtggacgacacgcagttcgtgcggtttgacagcgacgccgcgagccagaggatggagccgcgggcaccgtggatagagcaggagggkccggagtattgggacctgcagacacggaatgtgaaggcccagtcacagactgaccgagcgaacctggggaccctgcgcggctactacaaccagagcgagg

SEQ ID NO: 1286 - DNA, 201 bp, Homo sapiens
ccgtgggctacgtggacgacacgcagttcgtgcggtttgacagcgacgccgcgagccagaggatggagccgcgggcaccgtggatagagcaggaggggcckgagtattgggacctgcagacacggaatgtgaaggcccagtcacagactgaccgagcgaacctggggaccctgcgcggctactacaaccagagcgaggccg

SEQ ID NO: 1287 - DNA, 201 bp, Homo sapiens
gtcgcggttctaaagtccgcacgcacccaccgggactcagattctccccagacgccgaggatggccgtcatggcgccccgaaccctcctcctgctactctygggggccctggccctgacccagacctgggcgggctcccactccatgaggtatttcaccacatccgtgtcccggcccggccgcggggagccccgcttcatc

SEQ ID NO: 1288 - DNA, 201 bp, Homo sapiens
ggacgacacgcagttcgtgcggtttgacagcgacgccgcgagccagaggatggagccgcgggcaccgtggatagagcaggaggggccggagtattgggacstgcagacacggaatgtgaaggcccagtcacagactgaccgagcgaacctggggaccctgcgcggctactacaaccagagcgaggccggttctcacaccat

SEQ ID NO: 1289 - DNA, 201 bp, Homo sapiens
cggctactacaaccagagcgaggccggttctcacaccatccagatgatgtatggctgcgacgtggggtcggacgggcgcttcctccgcgggtaccggcagkacgcctacgacggcaaggattacatcgccttgaacgaggacctgcgctcttggaccgcggcggacatggcggctcagatcacccagcgcaagtgggaggc

SEQ ID NO: 1290 - DNA, 201 bp, Homo sapiens
tcctcctgctactcttgggggccctggccctgacccagacctgggcgggctcccactccatgaggtatttcaccacatccgtgtcccggcccggccgcggrgagccccgcttcatcgccgtgggctacgtggacgacacgcagttcgtgcggtttgacagcgacgccgcgagccagaggatggagccgcgggcaccgtgga

SEQ ID NO: 1291 - DNA, 201 bp, Homo sapiens
agctgtggtcgctgctgtgaggtggaggaggaagagctcagatagaaaaggagggagctactctcaggctgcaagcagtgacagtgcccagggctctgatrtgtctctcacagcttgtaaagtgtgagacagctgccttgtgtgggactgagaggcaagagttgttcctgcccttccctttgtgacttgaagaaccctgac

SEQ ID NO: 1292 - DNA, 201 bp, Homo sapiens; identical to SEQ ID NO: 1179

SEQ ID NO: 1293 - DNA, 201 bp, Homo sapiens; identical to SEQ ID NO: 1180

SEQ ID NO: 1294 - DNA, 201 bp, Homo sapiens; identical to SEQ ID NO: 1181

SEQ ID NO: 1295 - DNA, 201 bp, Homo sapiens; identical to SEQ ID NO: 1182

SEQ ID NO: 1296 - DNA, 201 bp, Homo sapiens; identical to SEQ ID NO: 1183

SEQ ID NO: 1297 - DNA, 201 bp, Homo sapiens; identical to SEQ ID NO: 1184

SEQ ID NO: 1298 - DNA, 201 bp, Homo sapiens; identical to SEQ ID NO: 1185

SEQ ID NO: 1299 - DNA, 201 bp, Homo sapiens; identical to SEQ ID NO: 1186

SEQ ID NO: 1300 - DNA, 201 bp, Homo sapiens; identical to SEQ ID NO: 1187

SEQ ID NO: 1301 - DNA, 201 bp, Homo sapiens; identical to SEQ ID NO: 1188

SEQ ID NO: 1302 - DNA, 201 bp, Homo sapiens; identical to SEQ ID NO: 1189

SEQ ID NO: 1303 - DNA, 201 bp, Homo sapiens; identical to SEQ ID NO: 1190

SEQ ID NO: 1304 - DNA, 201 bp, Homo sapiens; identical to SEQ ID NO: 1191

SEQ ID NO: 1305 - DNA, 201 bp, Homo sapiens; identical to SEQ ID NO: 1192

SEQ ID NO: 1306 - DNA, 201 bp, Homo sapiens; identical to SEQ ID NO: 1193

SEQ ID NO: 1307 - DNA, 201 bp, Homo sapiens; identical to SEQ ID NO: 1194

SEQ ID NO: 1308 - DNA, 201 bp, Homo sapiens; identical to SEQ ID NO: 1195

SEQ ID NO: 1309 - DNA, 201 bp, Homo sapiens; identical to SEQ ID NO: 1196

SEQ ID NO: 1310 - DNA, 201 bp, Homo sapiens; identical to SEQ ID NO: 1197

SEQ ID NO: 1311 - DNA, 201 bp, Homo sapiens; identical to SEQ ID NO: 1198

SEQ ID NO: 1312 - DNA, 201 bp, Homo sapiens
ctctcaggctgcaagcagtgacagtgcccagggctctgatgtgtctctcacagcttgtaaagtgtgagacagctgccttgtgtgggactgagaggcaagakttgttcctgcccttccctttgtgacttgaagaaccctgactttgtttctgcaaaggcaccttccaccatgaccctcttcccacgctgacctgtgctccct

SEQ ID NO: 1313 - DNA, 201 bp, Homo sapiens; identical to SEQ ID NO: 1203

SEQ ID NO: 1314 - DNA, 101 bp, Homo sapiens; identical to SEQ ID NO: 1205

SEQ ID NO: 1315 - DNA, 113 bp, Homo sapiens; identical to SEQ ID NO: 1207

SEQ ID NO: 1316 - DNA, 201 bp, Homo sapiens; identical to SEQ ID NO: 1208

SEQ ID NO: 1317 - DNA, 201 bp, Homo sapiens; identical to SEQ ID NO: 1210

SEQ ID NO: 1318 - DNA, 201 bp, Homo sapiens; identical to SEQ ID NO: 1211

SEQ ID NO: 1319 - DNA, 201 bp, Homo sapiens; identical to SEQ ID NO: 1212

SEQ ID NO: 1320 - DNA, 201 bp, Homo sapiens; identical to SEQ ID NO: 1214

SEQ ID NO: 1321 - DNA, 201 bp, Homo sapiens; identical to SEQ ID NO: 1216

SEQ ID NO: 1322 - DNA, 201 bp, Homo sapiens; identical to SEQ ID NO: 1217

SEQ ID NO: 1323 - DNA, 201 bp, Homo sapiens; identical to SEQ ID NO: 1218

SEQ ID NO: 1324 - DNA, 201 bp, Homo sapiens; identical to SEQ ID NO: 1219

SEQ ID NO: 1325 - DNA, 201 bp, Homo sapiens; identical to SEQ ID NO: 1220

SEQ ID NO: 1326 - DNA, 201 bp, Homo sapiens
tgcccagggctctgatgtgtctctcacagcttgtaaagtgtgagacagctgccttgtgtgggactgagaggcaagagttgttcctgcccttccctttgtgrcttgaagaaccctgactttgtttctgcaaaggcaccttccaccatgaccctcttcccacgctgacctgtgctccctccccaatcatctttcctgttccag

SEQ ID NO: 1327 - DNA, 201 bp, Homo sapiens; identical to SEQ ID NO: 1222

SEQ ID NO: 1328 - DNA, 201 bp, Homo sapiens; identical to SEQ ID NO: 1223

SEQ ID NO: 1329 - DNA, 201 bp, Homo sapiens; identical to SEQ ID NO: 1224

SEQ ID NO: 1330 - DNA, 201 bp, Homo sapiens; identical to SEQ ID NO: 1225

SEQ ID NO: 1331 - DNA, 201 bp, Homo sapiens; identical to SEQ ID NO: 1226

SEQ ID NO: 1332 - DNA, 201 bp, Homo sapiens; identical to SEQ ID NO: 1227

SEQ ID NO: 1333 - DNA, 201 bp, Homo sapiens; identical to SEQ ID NO: 1228

SEQ ID NO: 1334 - DNA, 201 bp, Homo sapiens; identical to SEQ ID NO: 1229

SEQ ID NO: 1335 - DNA, 201 bp, Homo sapiens; identical to SEQ ID NO: 1230

SEQ ID NO: 1336 - DNA, 201 bp, Homo sapiens; identical to SEQ ID NO: 1231

SEQ ID NO: 1337 - DNA, 201 bp, Homo sapiens; identical to SEQ ID NO: 1232

SEQ ID NO: 1338 - DNA, 195 bp, Homo sapiens
gctctgatgtgtctctcacagcttgtaaagtgtgagacagctgccttgtgtgggactgagaggcaagagttgttcctgcccttccctttgtgacttgaagwaccctgactttgtttctgcaaaggcaccttccaccatgaccctcttcccacgctgacctgtgctccctccccaatcatctttcctgttccagag

SEQ ID NO: 1339 - DNA, 201 bp, Homo sapiens; identical to SEQ ID NO: 1234

SEQ ID NO: 1340 - DNA, 201 bp, Homo sapiens; identical to SEQ ID NO: 1235

SEQ ID NO: 1341 - DNA, 201 bp, Homo sapiens; identical to SEQ ID NO: 1237

SEQ ID NO: 1342 - DNA, 201 bp, Homo sapiens; identical to SEQ ID NO: 1238

SEQ ID NO: 1343 - DNA, 201 bp, Homo sapiens; identical to SEQ ID NO: 1240

SEQ ID NO: 1344 - DNA, 201 bp, Homo sapiens; identical to SEQ ID NO: 1241

SEQ ID NO: 1345 - DNA, 201 bp, Homo sapiens; identical to SEQ ID NO: 1242

SEQ ID NO: 1346 - DNA, 201 bp, Homo sapiens; identical to SEQ ID NO: 1243

SEQ ID NO: 1347 - DNA, 201 bp, Homo sapiens; identical to SEQ ID NO: 1244

SEQ ID NO: 1348 - DNA, 201 bp, Homo sapiens; identical to SEQ ID NO: 1246

SEQ ID NO: 1349 - DNA, 201 bp, Homo sapiens; identical to SEQ ID NO: 1245

SEQ ID NO: 1350 - DNA, 201 bp, Homo sapiens; identical to SEQ ID NO: 1247

SEQ ID NO: 1351 - DNA, 201 bp, Homo sapiens; identical to SEQ ID NO: 1248

SEQ ID NO: 1352 - DNA, 201 bp, Homo sapiens; identical to SEQ ID NO: 1249

SEQ ID NO: 1353 - DNA, 201 bp, Homo sapiens; identical to SEQ ID NO: 1250

SEQ ID NO: 1354 - DNA, 201 bp, Homo sapiens; identical to SEQ ID NO: 1251

SEQ ID NO: 1355 - DNA, 201 bp, Homo sapiens; identical to SEQ ID NO: 1252

SEQ ID NO: 1356 - DNA, 201 bp, Homo sapiens; identical to SEQ ID NO: 1253

SEQ ID NO: 1357 - DNA, 201 bp, Homo sapiens; identical to SEQ ID NO: 1254

SEQ ID NO: 1358 - DNA, 201 bp, Homo sapiens; identical to SEQ ID NO: 1255

SEQ ID NO: 1359 - DNA, 201 bp, Homo sapiens; identical to SEQ ID NO: 1256

SEQ ID NO: 1360 - DNA, 201 bp, Homo sapiens; identical to SEQ ID NO: 1257

SEQ ID NO: 1361 - DNA, 201 bp, Homo sapiens; identical to SEQ ID NO: 1258

SEQ ID NO: 1362 - DNA, 201 bp, Homo sapiens; identical to SEQ ID NO: 1259

SEQ ID NO: 1363 - DNA, 201 bp, Homo sapiens; identical to SEQ ID NO: 1260

SEQ ID NO: 1364 - DNA, 201 bp, Homo sapiens; identical to SEQ ID NO: 1261

SEQ ID NO: 1365 - DNA, 201 bp, Homo sapiens; identical to SEQ ID NO: 1263

SEQ ID NO: 1366 - DNA, 125 bp, Homo sapiens
tgttcctgcccttccctttgtgacttgaagaaccctgactttgtttctgcaaaggcaccttccaccatgaccctcttcccacgctgacctgtgctccctcyccaatcatctttcctgttccagag

SEQ ID NO: 1367 - DNA, 201 bp, Homo sapiens; identical to SEQ ID NO: 1265

SEQ ID NO: 1368 - DNA, 162 bp, Homo sapiens; identical to SEQ ID NO: 1266

SEQ ID NO: 1369 - DNA, 106 bp, Homo sapiens
gtgacttgaagaaccctgactttgtttctgcaaaggcaccttccaccatgaccctcttcccacgctgacctgtgctccctccccaatcatctttcctgttscagag

SEQ ID NO: 1370 - DNA, 201 bp, Homo sapiens; identical to SEQ ID NO: 1268

SEQ ID NO: 1371 - DNA, 201 bp, Homo sapiens; identical to SEQ ID NO: 1269

SEQ ID NO: 1372 - DNA, 201 bp, Homo sapiens; identical to SEQ ID NO: 1270

SEQ ID NO: 1373 - DNA, 201 bp, Homo sapiens; identical to SEQ ID NO: 1271

SEQ ID NO: 1374 - DNA, 201 bp, Homo sapiens; identical to SEQ ID NO: 1272

SEQ ID NO: 1375 - DNA, 201 bp, Homo sapiens; identical to SEQ ID NO: 1273

SEQ ID NO: 1376 - DNA, 201 bp, Homo sapiens; identical to SEQ ID NO: 1274

SEQ ID NO: 1377 - DNA, 201 bp, Homo sapiens; identical to SEQ ID NO: 1275

SEQ ID NO: 1378 - DNA, 201 bp, Homo sapiens; identical to SEQ ID NO: 1276

SEQ ID NO: 1379 - DNA, 201 bp, Homo sapiens; identical to SEQ ID NO: 1277

SEQ ID NO: 1380 - DNA, 201 bp, Homo sapiens; identical to SEQ ID NO: 1278

SEQ ID NO: 1381 - DNA, 201 bp, Homo sapiens; identical to SEQ ID NO: 1279

SEQ ID NO: 1382 - DNA, 201 bp, Homo sapiens; identical to SEQ ID NO: 1280

SEQ ID NO: 1383 - DNA, 201 bp, Homo sapiens; identical to SEQ ID NO: 1281

SEQ ID NO: 1384 - DNA, 201 bp, Homo sapiens; identical to SEQ ID NO: 1282

SEQ ID NO: 1385 - DNA, 201 bp, Homo sapiens; identical to SEQ ID NO: 1283

SEQ ID NO: 1386 - DNA, 201 bp, Homo sapiens; identical to SEQ ID NO: 1284

SEQ ID NO: 1387 - DNA, 201 bp, Homo sapiens; identical to SEQ ID NO: 1285

SEQ ID NO: 1388 - DNA, 201 bp, Homo sapiens; identical to SEQ ID NO: 1286

SEQ ID NO: 1389 - DNA, 201 bp, Homo sapiens; identical to SEQ ID NO: 1287

SEQ ID NO: 1390 - DNA, 201 bp, Homo sapiens; identical to SEQ ID NO: 1288

SEQ ID NO: 1391 - DNA, 201 bp, Homo sapiens; identical to SEQ ID NO: 1289

SEQ ID NO: 1392 - DNA, 201 bp, Homo sapiens; identical to SEQ ID NO: 1290

SEQ ID NO: 1393 - DNA, 201 bp, Homo sapiens; identical to SEQ ID NO: 1291

SEQ ID NO: 1394 - DNA, 201 bp, Homo sapiens
gtgagctgcggagagctcatggaaggcgagtgggaacccggctgcctgcctttttttctgatccagaccctcggcacctgctacttaccaactggaaaatrttatgcatcccatgaagcccagatacacaaaattccaccccatgatcaagaatcctgctccactaagaatggtgctaaagtaaaactagtttaataagcc

SEQ ID NO: 1395 - DNA, 201 bp, Homo sapiens
caccagttaactacaagacaggcaatctatacctgcgggggcccctgaagaagtccaatgcaccgcttgtcaatgtgaccctctactatgaagcactgtgsggtggctgccgagccttcctgatccgggagctcttcccaacatggctgttggtcatggagatcctcaatgtcacgctggtgccctacggaaacgcacagg

SEQ ID NO: 1396 - DNA, 192 bp, Homo sapiens
gagctcatggaaggcgagtgggaacccggctgcctgcctttttttctgatccagaccctcggcacctgctacttaccaactggaaaattttatgcatcccrtgaagcccagatacacaaaattccaccccatgatcaagaatcctgctccactaagaatggtgctaaagtaaaactagtttaataagccctt

SEQ ID NO: 1397 - DNA, 201 bp, Homo sapiens
tgtctgcccttcctcaaccagctccctcaggagtgtttgcttcaagtgatggccggtgagctgcggagagctcatggaaggcgagtgggaacccggctgcktgcctttttttctgatccagaccctcggcacctgctacttaccaactggaaaattttatgcatcccatgaagcccagatacacaaaattccaccccatga

SEQ ID NO: 1398 - DNA, 201 bp, Homo sapiens
ctatcatggagtgtgcaatgggggaccgcggcatgcagctcatgcacgccaacgcccagcggacagatgctctccagccaccacacgagtatgtgccctgrgtcaccgtcaatgggaaacccttggaagatcagacccagctccttacccttgtctgccagttgtaccagggcaagaagccggatgtctgcccttcctcaa

SEQ ID NO: 1399 - DNA, 201 bp, Homo sapiens
cccagcggacagatgctctccagccaccacacgagtatgtgccctgggtcaccgtcaatgggaaacccttggaagatcagacccagctccttacccttgtytgccagttgtaccagggcaagaagccggatgtctgcccttcctcaaccagctccctcaggagtgtttgcttcaagtgatggccggtgagctgcggagagc

SEQ ID NO: 1400 - DNA, 201 bp, Homo sapiens
tgttggtcatggagatcctcaatgtcacgctggtgccctacggaaacgcacaggaacaaaatgtcagtggcaggtgggagttcaagtgccagcatggagakgaggagtgcaaattcaacaaggtggagtgcctgcagctctacgccccagggctgtcgccagacactatcatggagtgtgcaatgggggaccgcggcatgc

SEQ ID NO: 1401 - DNA, 201 bp, Homo sapiens
gacgtccccacggcggcggtgcaggcgtcccctctgcaagcgttagacttctttgggaatgggccaccagttaactacaagacaggcaatctatacctgcrggggcccctgaagaagtccaatgcaccgcttgtcaatgtgaccctctactatgaagcactgtgcggtggctgccgagccttcctgatccgggagctcttc

SEQ ID NO: 1402 - DNA, 134 bp, Homo sapiens
cacgccactccctgcgccagcttctgctttccgkcgtggctgtggtcaagcctgagtcagtcccacgggaccacgccgctgcagtcgccacacctttgcccctgctgcgatgaccctgtcgccacttctgctgt

SEQ ID NO: 1403 - DNA, 201 bp, Homo sapiens
gcccagcggacagatgctctccagccaccacacgagtatgtgccctgggtcaccgtcaatgggaaacccttggaagatcagacccagctccttacccttgsctgccagttgtaccagggcaagaagccggatgtctgcccttcctcaaccagctccctcaggagtgtttgcttcaagtgatggccggtgagctgcggagag

SEQ ID NO: 1404 - DNA, 201 bp, Homo sapiens
agaggagtgcaaattcaacaaggtggagtgcctgcagctctacgccccagggctgtcgccagacactatcatggagtgtgcaatgggggaccgcggcatgragctcatgcacgccaacgcccagcggacagatgctctccagccaccacacgagtatgtgccctgggtcaccgtcaatgggaaacccttggaagatcagac

SEQ ID NO: 1405 - DNA, 149 bp, Homo sapiens
ttctgatccagaccctcggcacctgctacttaccaactggaaaattttatgcatcccatgaagcccagatacacaaaattccaccccatgatcaagaatcmtgctccactaagaatggtgctaaagtaaaactagtttaataagccctt

SEQ ID NO: 1406 - DNA, 116 bp, Homo sapiens
caactggaaaattttatgcatcccatgaagcccagatacacaaaattccaccccatgatcaagaatcctgctccactaagaatggtgctaaagtaaaactygtttaataagccctt

SEQ ID NO: 1407 - DNA, 201 bp, Homo sapiens
tgaccctctactatgaagcactgtgcggtggctgccgagccttcctgatccgggagctcttcccaacatggctgttggtcatggagatcctcaatgtcacsctggtgccctacggaaacgcacaggaacaaaatgtcagtggcaggtgggagttcaagtgccagcatggagaagaggagtgcaaattcaacaaggtggagg

SEQ ID NO: 1408 - DNA, 201 bp, Homo sapiens
gggatggacaagacagagggaccagagataaaggaacccaggcggaggttgcagtgagctgagatcatgccactgcactccagcctgggcaacaagagcakaacttgatagctttgcatagggaaagagggcattgatgctggggttttgaaaggtgagtaggagtccatcaggcaaaaaaagtatgtattaattcgaagt

SEQ ID NO: 1409 - DNA, 201 bp, Homo sapiens
cagggctgtcgccagacactatcatggagtgtgcaatgggggaccgcggcatgcagctcatgcacgccaacgcccagcggacagatgctctccagccaccrcacgagtatgtgccctgggtcaccgtcaatggggtaagaatctttttagccctcagcttgacactcatagtcccatggagtcagggatggacaagacaga

SEQ ID NO: 1410 - DNA, 201 bp, Homo sapiens
agctcatgcacgccaacgcccagcggacagatgctctccagccaccacacgagtatgtgccctgggtcaccgtcaatggggtaagaatctttttagccctyagcttgacactcatagtcccatggagtcagggatggacaagacagagggaccagagataaaggaacccaggcggaggttgcagtgagctgagatcatgcc

SEQ ID NO: 1411 - DNA, 201 bp, Homo sapiens
gggagttcaagtgccagcatggagaagaggagtgcaaattcaacaaggtggaggcctgcgtgttggatgaacttgacatggagctagccttcctgaccatkgtctgcatggaagagtttgaggacatggagagaagtctgccactatgcctgcagctctacgccccagggctgtcgccagacactatcatggagtgtgcaa

SEQ ID NO: 1412 - DNA, 201 bp, Homo sapiens
tacaagacaggcaatctatacctgcgggggcccctgaagaagtccaatgcaccgcttgtcaatgtgaccctctactatgaagcactgtgcggtggctgccragccttcctgatccgggagctcttcccaacatggctgttggtcatggagatcctcaatgtcacgctggtgccctacggaaacgcacaggaacaaaatgtc

SEQ ID NO: 1413 - DNA, 201 bp, Homo sapiens
tccctgcgccagcttctgctttccggcgtggctgtggtcaagcctgagtcagtcccacgggaccacgccgctgcagtcgccacacctttgcccctgctgckatgaccctgtcgccacttctgctgttcctgccaccgctgctgctgctgctggacgtccccacggcggcggtgcaggcgtcccctctgcaagcgttagact

SEQ ID NO: 1414 - DNA, 201 bp, Homo sapiens
cagctcatgcacgccaacgcccagcggacagatgctctccagccaccacacgagtatgtgccctgggtcaccgtcaatggggtaagaatctttttagcccscagcttgacactcatagtcccatggagtcagggatggacaagacagagggaccagagataaaggaacccaggcggaggttgcagtgagctgagatcatgc

SEQ ID NO: 1415 - DNA, 201 bp, Homo sapiens
tgtctgcatggaagagtttgaggacatggagagaagtctgccactatgcctgcagctctacgccccagggctgtcgccagacactatcatggagtgtgcartgggggaccgcggcatgcagctcatgcacgccaacgcccagcggacagatgctctccagccaccacacgagtatgtgccctgggtcaccgtcaatggggt

SEQ ID NO: 1416 - DNA, 201 bp, Homo sapiens
gctgagatcatgccactgcactccagcctgggcaacaagagcaaaacttgatagctttgcatagggaaagagggcattgatgctggggttttgaaaggtgygtaggagtccatcaggcaaaaaaagtatgtattaattcgaagtattaaacatccctagccacccccattgggaaagatgtgccactgatttgcgaggcgg

SEQ ID NO: 1417 - DNA, 201 bp, Homo sapiens
tgcttcaagtgatggccggtgagctgcggagagctcatggaaggcgagtgggaacccggctgcctgcctttttttctgatccagaccctcggcacctgctrcttaccaactggaaaattttatgcatcccatgaagcccagatacacaaaattccaccccatgatcaagaatcctgctccactaagaatggtgctaaagta

SEQ ID NO: 1418 - DNA, 201 bp, Homo sapiens; identical to SEQ ID NO: 1407

SEQ ID NO: 1419 - DNA, 201 bp, Homo sapiens
tggccggtgagctgcggagagctcatggaaggcgagtgggaacccggctgcctgcctttttttctgatccagaccctcggcacctgctacttaccaactgraaaattttatgcatcccatgaagcccagatacacaaaattccaccccatgatcaagaatcctgctccactaagaatggtgctaaagtaaaactagtttaa

SEQ ID NO: 1420 - DNA, 201 bp, Homo sapiens
ccagggcaagaagccggatgtctgcccttcctcaaccagctccctcaggagtgtttgcttcaagtgatggccggtgagctgcggagagctcatggaaggckagtgggaacccggctgcctgcctttttttctgatccagaccctcggcacctgctacttaccaactggaaaattttatgcatcccatgaagcccagataca

SEQ ID NO: 1421 - DNA, 201 bp, Homo sapiens
cagggctgtcgccagacactatcatggagtgtgcaatgggggaccgcggcatgcagctcatgcacgccaacgcccagcggacagatgctctccagccaccrcacgagtatgtgccctgggtcaccgtcaatgggaaacccttggaagatcagacccagctccttacccttgtctgccagttgtaccagggcaagaagccgg

SEQ ID NO: 1422 - DNA, 201 bp, Homo sapiens
agctcatgcacgccaacgcccagcggacagatgctctccagccaccacacgagtatgtgccctgggtcaccgtcaatgggaaacccttggaagatcagacycagctccttacccttgtctgccagttgtaccagggcaagaagccggatgtctgcccttcctcaaccagctccctcaggagtgtttgcttcaagtgatggc

SEQ ID NO: 1423 - DNA, 201 bp, Homo sapiens; identical to SEQ ID NO: 1411

SEQ ID NO: 1424 - DNA, 201 bp, Homo sapiens; identical to SEQ ID NO: 1412

SEQ ID NO: 1425 - DNA, 201 bp, Homo sapiens; identical to SEQ ID NO: 1413

SEQ ID NO: 1426 - DNA, 201 bp, Homo sapiens
cagctcatgcacgccaacgcccagcggacagatgctctccagccaccacacgagtatgtgccctgggtcaccgtcaatgggaaacccttggaagatcagasccagctccttacccttgtctgccagttgtaccagggcaagaagccggatgtctgcccttcctcaaccagctccctcaggagtgtttgcttcaagtgatgg

SEQ ID NO: 1427 - DNA, 201 bp, Homo sapiens
tgtctgcatggaagagtttgaggacatggagagaagtctgccactatgcctgcagctctacgccccagggctgtcgccagacactatcatggagtgtgcartgggggaccgcggcatgcagctcatgcacgccaacgcccagcggacagatgctctccagccaccacacgagtatgtgccctgggtcaccgtcaatgggaa

SEQ ID NO: 1428 - DNA, 167 bp, Homo sapiens
ccggctgcctgcctttttttctgatccagaccctcggcacctgctacttaccaactggaaaattttatgcatcccatgaagcccagatacacaaaattccmccccatgatcaagaatcctgctccactaagaatggtgctaaagtaaaactagtttaataagccctt

SEQ ID NO: 1429 - DNA, 134 bp, Homo sapiens
tcggcacctgctacttaccaactggaaaattttatgcatcccatgaagcccagatacacaaaattccaccccatgatcaagaatcctgctccactaagaayggtgctaaagtaaaactagtttaataagccctt

SEQ ID NO: 1430 - DNA, 201 bp, Homo sapiens
aacttggtgagaattaaaattgacctttgggagagggtaggggcaggatgttttatgacactgtagaaaagacaggaggaacccgctgcgatggagattgsggggagctggaagcaagcagccaacaggacagagttccagaactcatgcagatggggaagaggtgacagcccttccccactggcctcccccgtggaggtg

SEQ ID NO: 1431 - DNA, 201 bp, Homo sapiens
catacagagatgtgcaaaacttggtgagaattaaaattgacctttgggagagggtaggggcaggatgttttatgacactgtagaaaagacaggaggaaccygctgcgatggagattggggggagctggaagcaagcagccaacaggacagagttccagaactcatgcagatggggaagaggtgacagcccttccccactgg

SEQ ID NO: 1432 - DNA, 201 bp, Homo sapiens
tgtaaacaggcccattcagggctgcctgagcaaatggggacttgccgaggcagctgcaactagacttgggctaagccgtctgggtctactcaagaattcgmgtctgaagatgaccaagcttgagttattcaactgagagtgaggtgtcaaggcggaagcgactgtccccagggaagggctgtgagatggatgggcgtgagt

SEQ ID NO: 1433 - DNA, 201 bp, Homo sapiens
cctccctcggagagcagggtctctcggcatccagcggcgtggtctgcattctgctctacctcatgctctaggccccatgccatcgtctcggccctagaccrtgaaaactgccagtcacccgggacctgctcctaggggctggcctgcacagccggatggcctgtgggcggggtggaagtgcccactcccactccagatggg

SEQ ID NO: 1434 - DNA, 201 bp, Homo sapiens
aggtgtcaaggcggaagcgactgtccccagggaagggctgtgagatggatgggcgtgagtcagcttttccaaaactcaagtacctgggacaggacaactcrctagcagctcagtcacctccgtggcggacacagataaggatgttaagaccagaaaaccagagactagggccccgtcctcagccctcacagcatgacacag

SEQ ID NO: 1435 - DNA, 201 bp, Homo sapiens
tccccactggcctcccccgtggaggtggagtagacagatcccgggaaaggcaggaaaagggccttgctttctttccctgtttcctaagccgtggtcacccyagcctatgaagctggaagctatattccttccaatcccaatttaccattcctgtaaacaggcccattcagggctgcctgagcaaatggggacttgccgagg

SEQ ID NO: 1436 - DNA, 201 bp, Homo sapiens; identical to SEQ ID NO: 1432

SEQ ID NO: 1437 - DNA, 201 bp, Homo sapiens; identical to SEQ ID NO: 1433

SEQ ID NO: 1438 - DNA, 201 bp, Homo sapiens; identical to SEQ ID NO: 1434

SEQ ID NO: 1439 - DNA, 201 bp, Homo sapiens
gggctgtcctgacagcacagacgcttcagggagacagatcccgggaaaggcaggaaaagggccttgctttctttccctgtttcctaagccgtggtcacccyagcctatgaagctggaagctatattccttccaatcccaatttaccattcctgtaaacaggcccattcagggctgcctgagcaaatggggacttgccgagg

SEQ ID NO: 1440 - DNA, 201 bp, Homo sapiens
ctgctactgcaacagcagctttcagcttcaggcagatggcaagacctgcaaagattttgatgagtgctcagtgtacggcacctgcagccagctatgcaccracacagacggctccttcatatgtggctgtgttgaaggatacctcctgcagccggataaccgctcctgcaaggccaagaacgagccagtagaccggccccc

SEQ ID NO: 1441 - DNA, 201 bp, Homo sapiens
agagctactgtgccaagcatctcaaatgcagccaaaagtgcgaccagaacaagttcagcgtgaagtgctcctgctacgagggctgggtcctggaacctgayggcgagagctgtcgcagcctggaccccttcaagccgttcatcattttctccaaccgccatgaaatccggcgcatcgatcttcacaaaggagactacagcg

SEQ ID NO: 1442 - DNA, 201 bp, Homo sapiens
gctgtcgccctggcttccggctgaaggacgacggccggacgtgtgctgatgtggacgagtgcagcaccaccttcccctgcagccagcgctgcatcaacacycatggcagctataagtgtctgtgtgtggagggctatgcaccccgcggcggcgacccccacagctgcaaggctgtgactgacgaggaaccgtttctgatct

SEQ ID NO: 1443 - DNA, 201 bp, Homo sapiens
tgcgaccagtgctctctgaataacggtggctgcagccacaactgctcagtggcacctggcgaaggcattgtgtgttcctgccctctgggcatggagctggrgcccgacaaccacacctgccagatccagagctactgtgccaagcatctcaaatgcagccaaaagtgcgaccagaacaagttcagcgtgaagtgctcctgc

SEQ ID NO: 1444 - DNA, 201 bp, Homo sapiens
cagactgggatgccagcctgccccgcattgaggcagcctccatgagtggggctgggcgccgcaccgtgcaccgggagaccggctctgggggctggcccaaygggctcaccgtggactacctggagaagcgcatcctttggattgacgccaggtcagatgccatttactcagcccgttacgacggctctggccacatggagg

SEQ ID NO: 1445 - DNA, 201 bp, Homo sapiens
ccatcacacctacgagcacgcggcagaccacagccatggacttcagctatgccaacgagaccgtatgctgggtgcatgttggggacagtgctgctcagacrcagctcaagtgtgcccgcatgcctggcctaaagggcttcgtggatgagcacaccatcaacatctccctcagtctgcaccacgtggaacagatggccatcg

SEQ ID NO: 1446 - DNA, 201 bp, Homo sapiens
tccgctacgtggtgatctcccagggtctagacaagccccgggccatcaccgtccacccggagaaagggtacttgttctggactgagtggggtcagtatccrcgtattgagcggtctcggctagatggcacggagcgtgtggtgctggtcaacgtcagcatcagctggcccaacggcatctcagtggactaccaggatggga

SEQ ID NO: 1447 - DNA, 201 bp, Homo sapiens
tccagtgctccattaccaaacggtgcatcccccgggtctgggtctgcgaccgggacaatgactgtgtggatggcagtgatgagcccgccaactgcacccaratgacctgtggtgtggacgagttccgctgcaaggattcgggccgctgcatcccagcgcgttggaagtgtgacggagaggatgactgtggggatggctcgg

SEQ ID NO: 1448 - DNA, 201 bp, Homo sapiens
gccctggcacccacgtgtgcgtccccgagcgctggctctgtgacggtgacaaagactgtgctgatggtgcagacgagagcatcgcagctggttgcttgtayaacagcacttgtgacgaccgtgagttcatgtgccagaaccgccagtgcatccccaagcacttcgtgtgtgaccacgaccgtgactgtgcagatggctctg

SEQ ID NO: 1449 - DNA, 201 bp, Homo sapiens
aatgggcgctgtctgagctcccgccagtgggagtgtgatggcgagaatgactgccacgaccagagtgacgaggctcccaagaacccacactgcaccagccmagagcacaagtgcaatgcctcgtcacagttcctgtgcagcagtgggcgctgtgtggctgaggcactgctctgcaacggccaggatgactgtggcgacagc

SEQ ID NO: 1450 - DNA, 201 bp, Homo sapiens
gataaccgctcctgcaaggccaagaacgagccagtagaccggccccctgtgctgttgatagccaactcccagaacatcttggccacgtacctgagtggggyccaggtgtctaccatcacacctacgagcacgcggcagaccacagccatggacttcagctatgccaacgagaccgtatgctgggtgcatgttggggacagt

SEQ ID NO: 1451 - DNA, 201 bp, Homo sapiens
gcaagaacaaccgctgcgtgcccggccgctggcagtgcgactacgacaacgattgcggtgacaactccgatgaagagagctgcacccctcggccctgctcygagagtgagttctcctgtgccaacggccgctgcatcgcggggcgctggaaatgcgatggagaccacgactgcgcggacggctcggacgagaaagactgca

SEQ ID NO: 1452 - DNA, 201 bp, Homo sapiens
gtgaacatggcgaggacgagacccactgcaacaagttctgctcagaggcccagtttgagtgccagaaccatcgctgcatctccaagcagtggctgtgtgayggcagcgatgactgtggggatggctcagacgaggctgctcactgtgaaggcaagacgtgcggcccctcctccttctcctgccctggcacccacgtgtgcg

SEQ ID NO: 1453 - DNA, 201 bp, Homo sapiens
cgacctgcggccccagtgagttccgctgtgccaatgggcgctgtctgagctcccgccagtgggagtgtgatggcgagaatgactgccacgaccagagtgaygaggctcccaagaacccacactgcaccagcccagagcacaagtgcaatgcctcgtcacagttcctgtgcagcagtgggcgctgtgtggctgaggcactgc

SEQ ID NO: 1454 - DNA, 201 bp, Homo sapiens
gccagaaccgccagtgcatccccaagcacttcgtgtgtgaccacgaccgtgactgtgcagatggctctgatgagtcccccgagtgtgagtacccgacctgyggccccagtgagttccgctgtgccaatgggcgctgtctgagctcccgccagtgggagtgtgatggcgagaatgactgccacgaccagagtgacgaggctc

SEQ ID NO: 1455 - DNA, 201 bp, Homo sapiens
gccaggacatcccgcacatctttgcactgaccctgtttgaggactacgtctactggaccgactgggaaacaaagtccattaaccgagcccacaagaccacrggcaccaacaaaacgctcctcatcagcacgctgcaccggcccatggacctgcatgtcttccatgccctgcgccagccagacgtgcccaatcacccctgca

SEQ ID NO: 1456 - DNA, 201 bp, Homo sapiens
gccagaaccatcgctgcatctccaagcagtggctgtgtgacggcagcgatgactgtggggatggctcagacgaggctgctcactgtgaaggcaagacgtgyggcccctcctccttctcctgccctggcacccacgtgtgcgtccccgagcgctggctctgtgacggtgacaaagactgtgctgatggtgcagacgagagca

SEQ ID NO: 1457 - DNA, 201 bp, Homo sapiens
ccaagcatctcaaatgcagccaaaagtgcgaccagaacaagttcagcgtgaagtgctcctgctacgagggctgggtcctggaacctgacggcgagagctgycgcagcctggaccccttcaagccgttcatcattttctccaaccgccatgaaatccggcgcatcgatcttcacaaaggagactacagcgtcctggtgcccg

SEQ ID NO: 1458 - DNA, 201 bp, Homo sapiens
acaacaccaagggcggccacctctgcagctgcgctcggaacttcatgaagacgcacaacacctgcaaggccgaaggctctgagtaccaggtcctgtacatygctgatgacaatgagatccgcagcctgttccccggccacccccattcggcttacgagcaggcattccagggtgacgagagtgtccgcattgatgctatgg

SEQ ID NO: 1459 - DNA, 201 bp, Homo sapiens
cgcacccttgtgccaacaacacctcagtctgcctgccccctgacaagctgtgtgatggcaacgacgactgtggcgacggctcagatgagggcgagctctgygaccagtgctctctgaataacggtggctgcagccacaactgctcagtggcacctggcgaaggcattgtgtgttcctgccctctgggcatggagctggggc

SEQ ID NO: 1460 - DNA, 201 bp, Homo sapiens
acactgatgagttccagtgccggctggatggactatgcatccccctgcggtggcgctgcgatggggacactgactgcatggactccagcgatgagaagagytgtgagggagtgacccacgtctgcgatcccagtgtcaagtttggctgcaaggactcagctcggtgcatcagcaaagcgtgggtgtgtgatggcgacaatg

SEQ ID NO: 1461 - DNA, 201 bp, Homo sapiens
gcaaagacaatgccacagactccgtgcccctgcgaaccggcatcggcgtccagcttaaagacatcaaagtcttcaaccgggaccggcagaaaggcaccaaygtgtgcgcggtggccaatggcgggtgccagcagctgtgcctgtaccggggccgtgggcagcgggcctgcgcctgtgcccacgggatgctggctgaagacg

SEQ ID NO: 1462 - DNA, 201 bp, Homo sapiens
cctgcatgtgcacagccggctatagcctccggagtggccagcaggcctgcgagggcgtaggttcctttctcctgtactctgtgcatgagggaatcaggggrattcccctggatcccaatgacaagtcagatgccctggtcccagtgtccgggacctcgctggctgtcggcatcgacttccacgctgaaaatgacaccatct

SEQ ID NO: 1463 - DNA, 201 bp, Homo sapiens
tcctttggattgacgccaggtcagatgccatttactcagcccgttacgacggctctggccacatggaggtgcttcggggacacgagttcctgtcgcacccrtttgcagtgacgctgtacgggggggaggtctactggactgactggcgaacaaacacactggctaaggccaacaagtggaccggccacaatgtcaccgtgg

SEQ ID NO: 1464 - DNA, 201 bp, Homo sapiens
gagatccgaggtgtggacctggatgctccctactacaactacatcatctccttcacggtgcccgacatcgacaacgtcacagtgctagactacgatgcccrcgagcagcgtgtgtactggtctgacgtgcggacacaggccatcaagcgggccttcatcaacggcacaggcgtggagacagtcgtctctgcagacttgcca

SEQ ID NO: 1465 - DNA, 201 bp, Homo sapiens
aggtcctgagctgaaccacgcctttggcctgtgtcaccatggcaactacctcttctggactgagtatcggagtggcagtgtctaccgcttggaacggggtrtaggaggcgcaccccccactgtgacccttctgcgcagtgagcggccccccatctttgagatccgaatgtatgatgcccagcagcagcaagttggcaccaa

SEQ ID NO: 1466 - DNA, 201 bp, Homo sapiens
gtaaggcccagcgatgccagccaaacgagcataactgcctgggtactgagctgtgtgttcccatgtcccgcctctgcaatggggtccaggactgcatggayggctcagatgaggggccccactgccgagagctccaaggcaactgctctcgcctgggctgccagcaccattgtgtccccacactcgatgggcccacctgct

SEQ ID NO: 1467 - DNA, 201 bp, Homo sapiens
gctgaaccacgcctttggcctgtgtcaccatggcaactacctcttctggactgagtatcggagtggcagtgtctaccgcttggaacggggtgtaggaggcscaccccccactgtgacccttctgcgcagtgagcggccccccatctttgagatccgaatgtatgatgcccagcagcagcaagttggcaccaacaaatgccg

SEQ ID NO: 1468 - DNA, 201 bp, Homo sapiens
tctctgacgccaccctggacaagatcgagcggtgcgagtatgacggctcccaccgctatgtgatcctaaagtcagagcctgtccaccccttcgggctggcygtgtatggggagcacattttctggactgactgggtgcggcgggcagtgcagcgggccaacaagcacgtgggcagcaacatgaagctgctgcgcgtggaca

SEQ ID NO: 1469 - DNA, 201 bp, Homo sapiens
actgggtgcggcgggcagtgcagcgggccaacaagcacgtgggcagcaacatgaagctgctgcgcgtggacatcccccagcagcccatgggcatcatcgcygtggccaacgacaccaacagctgtgaactctctccatgccgaatcaacaacggtggctgccaggacctgtgtctgctcactcaccagggccatgtcaact

SEQ ID NO: 1470 - DNA, 201 bp, Homo sapiens
gggtctagacaagccccgggccatcaccgtccacccggagaaagggtacttgttctggactgagtggggtcagtatccgcgtattgagcggtctcggctaratggcacggagcgtgtggtgctggtcaacgtcagcatcagctggcccaacggcatctcagtggactaccaggatgggaagctgtactggtgcgatgcacg

SEQ ID NO: 1471 - DNA, 201 bp, Homo sapiens
ggtcaacgtcagcatcagctggcccaacggcatctcagtggactaccaggatgggaagctgtactggtgcgatgcacggacagacaagattgaacggatcracctggagacaggtgagaaccgcgaggtggttctgtccagcaacaacatggacatgttttcagtgtctgtgtttgaggatttcatctactggagtgacag

SEQ ID NO: 1472 - DNA, 201 bp, Homo sapiens
actacgacaacgattgcggtgacaactccgatgaagagagctgcacccctcggccctgctccgagagtgagttctcctgtgccaacggccgctgcatcgckgggcgctggaaatgcgatggagaccacgactgcgcggacggctcggacgagaaagactgcaccccccgctgtgacatggaccagttccagtgcaagagcg

SEQ ID NO: 1473 - DNA, 201 bp, Homo sapiens
ccaatggcgggtgccagcagctgtgcctgtaccggggccgtgggcagcgggcctgcgcctgtgcccacgggatgctggctgaagacggagcatcgtgccgygagtatgccggctacctgctctactcagagcgcaccattctcaagagtatccacctgtcggatgagcgcaacctcaatgcgcccgtgcagcccttcgagg

SEQ ID NO: 1474 - DNA, 136 bp, Homo sapiens
gaaagcgggcagccccgttttggggacgtgaacgttttaataatttttgctgaattcctttacaactaaataacacagatattgttataaataaaattgtaaaaaaaaaaaaaaaaaaggccaaaaaaaaaaaaag

SEQ ID NO: 1475 - DNA, 201 bp, Homo sapiens
acgtgtgcgcggtggccaatggcgggtgccagcagctgtgcctgtaccggggccgtgggcagcgggcctgcgcctgtgcccacgggatgctggctgaagayggagcatcgtgccgcgagtatgccggctacctgctctactcagagcgcaccattctcaagagtatccacctgtcggatgagcgcaacctcaatgcgcccg

SEQ ID NO: 1476 - DNA, 201 bp, Homo sapiens
atgagtgtctcagccgcaagctcagtggctgcagccaggactgtgaggacctcaagatcggcttcaagtgccgctgtcgccctggcttccggctgaaggaygacggccggacgtgtgctgatgtggacgagtgcagcaccaccttcccctgcagccagcgctgcatcaacacccatggcagctataagtgtctgtgtgtgg

SEQ ID NO: 1477 - DNA, 201 bp, Homo sapiens
gccgctgcaaccagtttgtggattgtgaggacgcctcagatgagatgaactgcagtgacttcgcctgccctagtgggcgctgcatccccatgagctggacrtgtgacaaagaggatgactgtgaacatggcgaggacgagacccactgcaacaagttctgctcagaggcccagtttgagtgccagaaccatcgctgcatct

SEQ ID NO: 1478 - DNA, 201 bp, Homo sapiens
atggcatcacgctggacctggtcagccgccttgtctactgggcagatgcctatctggactatattgaagtggtggactatgagggcaagggccgccagacyatcatccagggcatcctgattgagcacctgtacggcctgactgtgtttgagaattatctctatgccaccaactcggacaatgccaatgcccagcagaaga

SEQ ID NO: 1479 - DNA, 201 bp, Homo sapiens
acaagtgcaatgcctcgtcacagttcctgtgcagcagtgggcgctgtgtggctgaggcactgctctgcaacggccaggatgactgtggcgacagctcggaygagcgtggctgccacatcaatgagtgtctcagccgcaagctcagtggctgcagccaggactgtgaggacctcaagatcggcttcaagtgccgctgtcgcc

SEQ ID NO: 1480 - DNA, 201 bp, Homo sapiens
ctcggaacttcatgaagacgcacaacacctgcaaggccgaaggctctgagtaccaggtcctgtacatcgctgatgacaatgagatccgcagcctgttcccyggccacccccattcggcttacgagcaggcattccagggtgacgagagtgtccgcattgatgctatggatgtccatgtcaaggctggccgtgtctattgga

SEQ ID NO: 1481 - DNA, 201 bp, Homo sapiens
aggtgtttttcactgactatgggcagatcccaaaggtggaacgctgtgacatggatgggcagaaccgcaccaagctcgtcgacagcaagattgtgtttccycatggcatcacgctggacctggtcagccgccttgtctactgggcagatgcctatctggactatattgaagtggtggactatgagggcaagggccgccaga

SEQ ID NO: 1482 - DNA, 201 bp, Homo sapiens
cccacagcttcctgagggctaattctgggaagggagagttctttgctgcccctgtctggaagacgtggctctgggtgaggtaggcgggaaaggatggagtkttttagttcttgggggaggccaccccaaaccccagccccaactccaggggcacctatgagatggccatgctcaacccccctcccagacaggccctccctg

SEQ ID NO: 1483 - DNA, 201 bp, Homo sapiens; identical to SEQ ID NO: 1440

SEQ ID NO: 1484 - DNA, 201 bp, Homo sapiens; identical to SEQ ID NO: 1441

SEQ ID NO: 1485 - DNA, 201 bp, Homo sapiens; identical to SEQ ID NO: 1443

SEQ ID NO: 1486 - DNA, 201 bp, Homo sapiens; identical to SEQ ID NO: 1442

SEQ ID NO: 1487 - DNA, 201 bp, Homo sapiens; identical to SEQ ID NO: 1444

SEQ ID NO: 1488 - DNA, 201 bp, Homo sapiens; identical to SEQ ID NO: 1445

SEQ ID NO: 1489 - DNA, 201 bp, Homo sapiens; identical to SEQ ID NO: 1447

SEQ ID NO: 1490 - DNA, 201 bp, Homo sapiens; identical to SEQ ID NO: 1446

SEQ ID NO: 1491 - DNA, 201 bp, Homo sapiens; identical to SEQ ID NO: 1448

SEQ ID NO: 1492 - DNA, 201 bp, Homo sapiens; identical to SEQ ID NO: 1449

SEQ ID NO: 1493 - DNA, 201 bp, Homo sapiens; identical to SEQ ID NO: 1450

SEQ ID NO: 1494 - DNA, 201 bp, Homo sapiens; identical to SEQ ID NO: 1451

SEQ ID NO: 1495 - DNA, 201 bp, Homo sapiens; identical to SEQ ID NO: 1452

SEQ ID NO: 1496 - DNA, 201 bp, Homo sapiens; identical to SEQ ID NO: 1453

SEQ ID NO: 1497 - DNA, 201 bp, Homo sapiens; identical to SEQ ID NO: 1455

SEQ ID NO: 1498 - DNA, 201 bp, Homo sapiens; identical to SEQ ID NO: 1454

SEQ ID NO: 1499 - DNA, 201 bp, Homo sapiens; identical to SEQ ID NO: 1457

SEQ ID NO: 1500 - DNA, 201 bp, Homo sapiens; identical to SEQ ID NO: 1456

SEQ ID NO: 1501 - DNA, 201 bp, Homo sapiens; identical to SEQ ID NO: 1458

SEQ ID NO: 1502 - DNA, 201 bp, Homo sapiens; identical to SEQ ID NO: 1459

SEQ ID NO: 1503 - DNA, 201 bp, Homo sapiens; identical to SEQ ID NO: 1460

SEQ ID NO: 1504 - DNA, 201 bp, Homo sapiens; identical to SEQ ID NO: 1461

SEQ ID NO: 1505 - DNA, 201 bp, Homo sapiens; identical to SEQ ID NO: 1462

SEQ ID NO: 1506 - DNA, 201 bp, Homo sapiens; identical to SEQ ID NO: 1463

SEQ ID NO: 1507 - DNA, 201 bp, Homo sapiens; identical to SEQ ID NO: 1466

SEQ ID NO: 1508 - DNA, 201 bp, Homo sapiens; identical to SEQ ID NO: 1465

SEQ ID NO: 1509 - DNA, 201 bp, Homo sapiens; identical to SEQ ID NO: 1464

SEQ ID NO: 1510 - DNA, 201 bp, Homo sapiens; identical to SEQ ID NO: 1468

SEQ ID NO: 1511 - DNA, 201 bp, Homo sapiens; identical to SEQ ID NO: 1467

SEQ ID NO: 1512 - DNA, 201 bp, Homo sapiens; identical to SEQ ID NO: 1469

SEQ ID NO: 1513 - DNA, 201 bp, Homo sapiens; identical to SEQ ID NO: 1470

SEQ ID NO: 1514 - DNA, 201 bp, Homo sapiens; identical to SEQ ID NO: 1472

SEQ ID NO: 1515 - DNA, 201 bp, Homo sapiens; identical to SEQ ID NO: 1471

SEQ ID NO: 1516 - DNA, 201 bp, Homo sapiens
ccagccgctgcaaccagtttgtggattgtgaggacgcctcagatgagatgaactgcagtgagtgacgccctttgctggcacctcctgggctcctccccatygctcactgcatctcccgccttcaggccctcctgcacctgcccacattcctctctgccttccctcatccccgctgacagcctccatctccctgaggccctg

SEQ ID NO: 1517 - DNA, 201 bp, Homo sapiens; identical to SEQ ID NO: 1473

SEQ ID NO: 1518 - DNA, 201 bp, Homo sapiens; identical to SEQ ID NO: 1475

SEQ ID NO: 1519 - DNA, 201 bp, Homo sapiens; identical to SEQ ID NO: 1476

SEQ ID NO: 1520 - DNA, 201 bp, Homo sapiens
tcatccccgctgacagcctccatctccctgaggccctgtccccatcccgctcctgctcctgggctctcgtgggtgggcgctgcatccccatgagctggacrtgtgacaaagaggatgactgtgaacatggcgaggacgagacccactgcaacaagttctgctcagaggcccagtttgagtgccagaaccatcgctgcatct

SEQ ID NO: 1521 - DNA, 201 bp, Homo sapiens; identical to SEQ ID NO: 1479

SEQ ID NO: 1522 - DNA, 201 bp, Homo sapiens; identical to SEQ ID NO: 1478

SEQ ID NO: 1523 - DNA, 201 bp, Homo sapiens; identical to SEQ ID NO: 1480

SEQ ID NO: 1524 - DNA, 201 bp, Homo sapiens; identical to SEQ ID NO: 1481

SEQ ID NO: 1525 - DNA, 201 bp, Homo sapiens
cagaaggcagagtccaggcttagactgcagttcctcgcttacctgtgcagtctaattttgagctgcctctttgtagtcttaaaaggcaggagcttcgtgtwgtgggtctgctaacccgtacgtttccgtgggcaagtcgtgtgtactcctcgccatggctcagctccaaacacgcttctacactgataacaagaaatatgc

SEQ ID NO: 1526 - DNA, 201 bp, Homo sapiens
tgtaaaagatgtggcctgggtgaaaaaagatagtttgtcctgcttattattgagtgcttctatggatcagactattctcttatgggagtggaatgtagagmgaaacaaagtgaaagccctacactgctgtagaggtcatgctggaagtgtagattctatagctgttgatggctcaggaactaaattttgcagtggctcctg

SEQ ID NO: 1527 - DNA, 201 bp, Homo sapiens
aaaggacaaaaatgagttccacaaacatgtggagtttgatttccttattaagggccagtttctgcgaatgcccttggacaaacacatggaaatggagaacrtctcatcagaagaagttgtggaaatagaatacgtggagaagtatactgcaccccagccagagcaatgcatgttccatgatgactggatcagttcaattaa

SEQ ID NO: 1528 - DNA, 201 bp, Homo sapiens
gtagtaactaggagctgtgtttgaactatccaggctcaggacagcctcttgaaaaaaaattttttattaataaagcggatttgagtgggatctttttcctmatcgattacgggcccacacgtatgggaagaattctaacaatgattaaagggacatgctacctttacgactatccttttctaatcgatgactcctaaatct

SEQ ID NO: 1529 - DNA, 201 bp, Homo sapiens
atactggaaatggttatgggccaaatggatgtgtgcagctcagtaatatttgcctaagtcacccctgtctaaatggacaatgcatcgacactgtctctggytatttttgtaagtgtgactcaggttggacaggtgtcaactgtacagaaaacatcaatgagtgtttgagcaacccctgtttgaatggaggaacttgtgttg

SEQ ID NO: 1530 - DNA, 201 bp, Homo sapiens
cagtaatggaggctgccacccagatgcctcatgctcctcaactctaggttccttacctctctgcacgtgtctcccgggttatactggaaatggttatgggmcaaatggatgtgtgcagctcagtaatatttgcctaagtcacccctgtctaaatggacaatgcatcgacactgtctctggttatttttgtaagtgtgactc

SEQ ID NO: 1531 - DNA, 201 bp, Homo sapiens
ggttctgtggcacgctgtgtccatggcatctgtgaggatttaatgcgagagcaagctggagagcccaagtacagctgcgtctgtgatgctgggtggatgtyttcacccaacagccctgcctgcacgctggacagagacgagtgcagcttccagcccgggccttgctccacacttgtgcagtgtttcaacactcaaggctct

SEQ ID NO: 1532 - DNA, 201 bp, Homo sapiens
ttaccccagtccttataggagcaacacagactgttcttgggtcattcgggttgacagaaatcatcgtgttctcttgaacttcactgactttgatcttgaaycacaagactcttgtattatggcatacgatggcttaagctccacaatgtcccgccttgccaggacgtgtggaagggagcagctggctaaccccatcgtctc

SEQ ID NO: 1533 - DNA, 201 bp, Homo sapiens
acctatcagattgcagattgcaacagagactatcacaaggcatttggcaacctgagaagccctggatggccagataactacgacaatgacaaggattgcaycgttactctcacagccccccagaaccacaccatttccctcttttttcattcacttggcatcgagaactcagttgaatgcagaaacgatttcttggaggtg

SEQ ID NO: 1534 - DNA, 201 bp, Homo sapiens
ggtcagcaaggacgtggcttcaaggctgaataccggcagacatgtgagaatgtggtaatagtcaatcaaacctatggcatcttagagagtatagggtatcygaatccttattctgaaaatcagcattgcaactggaccatccgggcaacaacaggcaacactgtgaactacacatttttagcatttgacttggaacatcac

SEQ ID NO: 1535 - DNA, 201 bp, Homo sapiens
gcaatgataatattgtgggaactcatgggaaagtcgcctctcctttctggcctgaaaactacccacataactccaattaccaatggacagtaaatgtgaaygcatctcacgttgtccatggtagaatcttggagatggacatagaagaaatacaaaactgctattatgacaaattaaggatctatgatgggcctagcattc

SEQ ID NO: 1536 - DNA, 201 bp, Homo sapiens
ctggtaacttccttacggttcaattcatcagtgacttaacattagagagggaaggatttaatgctacatacaccatcatggacatgccttgtggtggaacrtacaatgcaacttggaccccacaaaatatttcatcacccaattcatcagacccagatgtcccattttccatctgtacttgggtcattgattcccctccgc

SEQ ID NO: 1537 - DNA, 201 bp, Homo sapiens
gttctacatggctgaaggcatcttcaacagccctggctacccagacatttatccccctaatgtggaatgtgtctggaacatcgtcagttcccctggcaacyggctccagctgtcttttatatctttccagttggaagactctcaggactgcagcagagattttgtggagatccgtgaaggaaatgccacgggtcacttggt

SEQ ID NO: 1538 - DNA, 201 bp, Homo sapiens
gaggctcattcaccagccccggctatccaggcacatacccaaacaacacgtactgcgagtgggtccttgttgctcctgctggaaggcttgtcaccatcaasttctacttcatcagcattgacgatccaggagactgtgtccagaactatctcacactctatgatgggcccaacgccagctctccatcctctggaccatact

SEQ ID NO: 1539 - DNA, 201 bp, Homo sapiens
ctttgtagaaattttggatggcggccacgaagacgcgcccctccgaggccgttactgtggcaccgacatgccccatcctatcacatccttcagcagcgccytgacgctgagattcgtctctgattctagcatcagtgctgggggtttccacaccacggtcaccgcatcagtgtcggcttgtggtggaacgttctacatggc

SEQ ID NO: 1540 - DNA, 201 bp, Homo sapiens
cttggtgggacgatactgtggaaactccttccctctcaattattcttccatcgttggacataccctgtgggtcagatttatctcagatggttctggcagcrgcacgggcttccaggccacatttatgaagatatttggcaatgataatattgtgggaactcatgggaaagtcgcctctcctttctggcctgaaaactaccc

SEQ ID NO: 1541 - DNA, 201 bp, Homo sapiens
accattgctgtccattttgaacagcctttccagattccaaatggagattcttcttgcaaccagggggattacttggtgctaagaaatggtcctgatatctrttctccacccttgggaccccctggaggaaatggtcatttttgtggcagtcatgcttcatcaactctgttcacctcggataatcaaatgtttgttcagttt

SEQ ID NO: 1542 - DNA, 201 bp, Homo sapiens
tggaaattctttgacatttcatttttactccgactcttcaatctcagggaagggattccttctggagtggtttgcagtggatgcacctgatggtgttttamctaccattgctccaggtgcttgtggtggcttcctgaggacgggagatgcacccgtgtttctcttctccccgggctggcctgacagttacagtaatagagt

SEQ ID NO: 1543 - DNA, 201 bp, Homo sapiens
gggtatgtgacctcccccaaccaccctcataattatcccccgcacgctgattgcatttggatcttagcggctccaccggaaacacgcatacagctgcaatktgaagatcgattcgatattgaagtaacacccaactgtacttccaactaccttgagttgcgggatggagtggattcggatgcaccaatactttccaaattt

SEQ ID NO: 1544 - DNA, 201 bp, Homo sapiens
tattcctttacagattgtggcggaatacagataggtgacagtggagtgatcacaagccccaactatccaaatgcttatgacagcctgacccactgctcttsgctgttggaggccccacaagggcacaccatcactctcacatttagtgactttgatattgaaccccatacaacttgtgcttgggactctgtcactgtcagg

SEQ ID NO: 1545 - DNA, 201 bp, Homo sapiens
tcaagaccgacttgtccataaatgggagaggcttcaatgcgtcatggcaagcagtcactggaggttgtggtgggattttccaggctcccagtggagagatwcattctccaaattaccccagtccttataggagcaacacagactgttcttgggtcattcgggttgacagaaatcatcgtgttctcttgaacttcactgact

SEQ ID NO: 1546 - DNA, 201 bp, Homo sapiens
acaatgaaagtcatttttttcacggatggatccaggccatatggcggcttcactgcttcctatacctccagtgaagatgcagtgtgtggtgggtctcttcsaaatactcctgaaggaaactttacttctcctggctatgacggagtcaggaattactcaagaaacctgaactgcgaatggactctcagcaatccaaatcag

SEQ ID NO: 1547 - DNA, 201 bp, Homo sapiens
ttctggaaatcagagatggaggctatgaaaaatcaccattgctgggaatattctatggctcaaatctacccccaacaatcatctctcatagtaacaaactrtggttaaaatttaagagtgaccaaatagacacaaggtctggattctcagcttactgggatgggtcatcaacaggttgcgggggtaatctcaccacttcaa

SEQ ID NO: 1548 - DNA, 201 bp, Homo sapiens
gacatcccttggaagatactgtggaaagtcgatcccgccatctctcacaagcagtggtaactcattgatgctggtgtttgtgactgactccgacctcgctyatgaaggcttcttaataaactatgaagcaatcagtgcagcaacagcatgtttgcaagactacacagatgatttggggacattcacttctccaaacttccc

SEQ ID NO: 1549 - DNA, 201 bp, Homo sapiens
agacatcccttggaagatactgtggaaagtcgatcccgccatctctcacaagcagtggtaactcattgatgctggtgtttgtgactgactccgacctcgcytatgaaggcttcttaataaactatgaagcaatcagtgcagcaacagcatgtttgcaagactacacagatgatttggggacattcacttctccaaacttcc

SEQ ID NO: 1550 - DNA, 201 bp, Homo sapiens
gtttcaacactcaaggctctttctactgtggggcctgtccaacaggctggcaaggcaatggatatatttgcgaagatatcaatgaatgtgagataaataayggcggctgttctgtggctccacccgttgagtgtgtgaatacacctgggtcttcccactgccaggcctgtccaccagggtaccagggtgacggaagagtgt

SEQ ID NO: 1551 - DNA, 201 bp, Homo sapiens
gctcgttccgctgtgacgggaagctgtgtcaacgatggcgtgcacattatcagaggttacagcgtcatgtccaccccatttgctactgtgtgtggggatgrgatgccagctcccctcaccatcgctgggccggttctgcttaacttctactccaacgagcaaatcacagacttcggattcaagttttcctataggataatc

SEQ ID NO: 1552 - DNA, 201 bp, Homo sapiens
tcaggtttaaaatagatgcttctgttgaaaaagctagtttcagagctgtttatcaagtcgcttgcggggatgaattaactggagaaggggtcattcgctcrcctttttttcctaacgtgtatcctggagaaagaacctgtaggtggaccatccaccagccccaaagccaagtcattctcctcaacttcactgtctttgaaa

SEQ ID NO: 1553 - DNA, 201 bp, Homo sapiens
agaggctaatcctctgtcagtggtcctcttgacttttgtgtccttccacttagaagctcgttccgctgtgacgggaagctgtgtcaacgatggcgtgcacrttatcagaggttacagcgtcatgtccaccccatttgctactgtgtgtggggatgagatgccagctcccctcaccatcgctgggccggttctgcttaactt

SEQ ID NO: 1554 - DNA, 201 bp, Homo sapiens
taaaatttaagagtgaccaaatagacacaaggtctggattctcagcttactgggatgggtcatcaacaggttgcgggggtaatctcaccacttcaagcggyacgttcatatctcccaactacccgatgccctattaccacagctctgaatgctactggtggttgaaatctagccacggcagcgcatttgaactggaattca

SEQ ID NO: 1555 - DNA, 201 bp, Homo sapiens
cagctttgacaacaacttcctaatccccagcggtgatggacaatgtcagaatagcttcgtgaaggtgtgggcaggaactgaggaggtggacaaagccctgmtagccactggctgtgggaacgtggctccgggtcccgttatcacaccaagtaacacattcactgccgtcttccagtctcaggaggcaccagctcagggctt

SEQ ID NO: 1556 - DNA, 201 bp, Homo sapiens
gcttctttagtcttgagtgtgcatttcattctaatattttgagctgaaatttaaaaaaactttgaaagagttggaaatgattatggcatatgtgacatacrtttttaaaagttaataataatagccaggggcagtggctcatacccataatcccagcacgctgggaggccatgatgggaggattgcttgaacctaggagtt

SEQ ID NO: 1557 - DNA, 201 bp, Homo sapiens
gtgtcaacgatggcgtgcacattatcagaggttacagcgtcatgtccaccccatttgctactgtgtgtggggatgagatgccagctcccctcaccatcgcygggccggttctgcttaacttctactccaacgagcaaatcacagacttcggattcaagttttcctataggataatctcctgtggtggtgtgttcaatttct

SEQ ID NO: 1558 - DNA, 201 bp, Homo sapiens
acgcccgcctaattggagcttactgtggtacccagactgaatctttcagctccactggaaattctttgacatttcatttttactccgactcttcaatctcrgggaagggattccttctggagtggtttgcagtggatgcacctgatggtgttttacctaccattgctccaggtgcttgtggtggcttcctgaggacgggag

SEQ ID NO: 1559 - DNA, 201 bp, Homo sapiens
cctctgcagcacgctggacagcactctgccatcctgatacatgacccctgctgatgccacagagaataagctgaacttgtatggtttttcaccaaaccatrgatagaatcaatatttgtaggccaggcgtggtggctcacccccctgtattctcagcactttgggaggccgaggcaggttgatcacctgaggtcaggagtt

SEQ ID NO: 1560 - DNA, 201 bp, Homo sapiens
acctgcaggtatgggttcatagaagggcacgtggtgattccccggatccaccccaactccatctgtgcagcaaacaacacaggggtgtacatcctcacatmcaacacctcccagtatgacacatattgcttcaatgcttcagctccacctgaagaagattgtacatcagtcacagacctgcccaatgcctttgatggacca

SEQ ID NO: 1561 - DNA, 201 bp, Homo sapiens
ttcacaaacccttgcaacattgcctgaagtttatggaataagatgtattctcactcccttgatctcaagggcgtaactctggaagcacagcttgactacaygtcatttttaccaatgattttcaggtgacctgggctaagtcatttaaactgggtctttataaaagtaaaaggccaacatttaattattttgcaaagcaac

SEQ ID NO: 1562 - DNA, 201 bp, Homo sapiens
aatgaagatgaaagagacagacacctcagtttttctggatcaggcattgatgatgatgaagattttatctccagcaccaatatggactccagtcatagtayaacgcttcagcctactgcaaatccaaacacaggtttggtggaagatttggacaggacaggacctctttcaatgacaacgcagcagagtaattctcagagc

SEQ ID NO: 1563 - DNA, 201 bp, Homo sapiens
aaacataaccattacagggagctgggacacttaacagatgcaatgtgctactgattgtttcattgcgaatcttttttagcataaaattttctactcttttygttttttgtgttttgttctttaaagtcaggtccaatttgtaaaaacagcattgctttctgaaattagggcccaattaataatcagcaagaatttgatcgt

SEQ ID NO: 1564 - DNA, 201 bp, Homo sapiens
aacttatgtgcttaacaggcaatgcttctcagaccacaaagcagaaagaagaagaaaagctcctgactaaatcagggctgggcttagacagagttgatctrtagaatatctttaaaggagagatgtcaactttctgcactattcccagcctctgctcctccctgtctaccctctcccctccctctctccctccacttcacc

SEQ ID NO: 1565 - DNA, 201 bp, Homo sapiens
tctgcaaggctttcaatagcaccttgcccacaatggcccagatggagaaagctctgagcatcggatttgagacctgcaggtatgggttcatagaagggcaygtggtgattccccggatccaccccaactccatctgtgcagcaaacaacacaggggtgtacatcctcacatccaacacctcccagtatgacacatattgct

SEQ ID NO: 1566 - DNA, 201 bp, Homo sapiens
ccacgtccctggcagccccgattatttacagcctcagcagagcacggggcgggggcagaggggcccgcccgggagggctgctacttcttaaaacctctgckggctgcttagtcacagccccccttgcttgggtgtgtccttcgctcgctccctccctccgtcttaggtcactgttttcaacctcgaataaaaactgcagcc

SEQ ID NO: 1567 - DNA, 201 bp, Homo sapiens
accagctaaggacatttcccagggttaatagggcctggtccctgggaggaaatttgaatgggtccattttgcccttccatagcctaatccctgggcattgytttccactgaggttgggggttggggtgtactagttacacatcttcaacagaccccctctagaaatttttcagatgcttctgggagacacccaaagggtga

SEQ ID NO: 1568 - DNA, 201 bp, Homo sapiens
gttggaaacataaccattacagggagctgggacacttaacagatgcaatgtgctactgattgtttcattgcgaatcttttttagcataaaattttctactytttttgttttttgtgttttgttctttaaagtcaggtccaatttgtaaaaacagcattgctttctgaaattagggcccaattaataatcagcaagaatttg

SEQ ID NO: 1569 - DNA, 201 bp, Homo sapiens
ccctgggaggaaatttgaatgggtccattttgcccttccatagcctaatccctgggcattgctttccactgaggttgggggttggggtgtactagttacayatcttcaacagaccccctctagaaatttttcagatgcttctgggagacacccaaagggtgaagctatttatctgtagtaaactatttatctgtgtttttg

SEQ ID NO: 1570 - DNA, 201 bp, Homo sapiens; identical to SEQ ID NO: 1560

SEQ ID NO: 1571 - DNA, 201 bp, Homo sapiens; identical to SEQ ID NO: 1561

SEQ ID NO: 1572 - DNA, 201 bp, Homo sapiens
accttttctactgtacaccccatcccagacgaagacagtccctggatcaccgacagcacagacagaatccctgctaccaatatggactccagtcatagtayaacgcttcagcctactgcaaatccaaacacaggtttggtggaagatttggacaggacaggacctctttcaatgacaacgcagcagagtaattctcagagc

SEQ ID NO: 1573 - DNA, 201 bp, Homo sapiens; identical to SEQ ID NO: 1563

SEQ ID NO: 1574 - DNA, 201 bp, Homo sapiens; identical to SEQ ID NO: 1564

SEQ ID NO: 1575 - DNA, 201 bp, Homo sapiens; identical to SEQ ID NO: 1565

SEQ ID NO: 1576 - DNA, 201 bp, Homo sapiens; identical to SEQ ID NO: 1566

SEQ ID NO: 1577 - DNA, 201 bp, Homo sapiens; identical to SEQ ID NO: 1567

SEQ ID NO: 1578 - DNA, 201 bp, Homo sapiens; identical to SEQ ID NO: 1568

SEQ ID NO: 1579 - DNA, 201 bp, Homo sapiens; identical to SEQ ID NO: 1569

SEQ ID NO: 1580 - DNA, 201 bp, Homo sapiens; identical to SEQ ID NO: 1560

SEQ ID NO: 1581 - DNA, 201 bp, Homo sapiens
aaggaacagtggtttggcaacagatggcatgagggatatcgccaaacacccagagaagactcccattcgacaacagggacagctgcagcctcagctcatamcagccatccaatgcaaggaaggacaacaccaagcccagaggacagttcctggactgatttcttcaacccaatctcacaccccatgggacgaggtcatcaa

SEQ ID NO: 1582 - DNA, 201 bp, Homo sapiens; identical to SEQ ID NO: 1561

SEQ ID NO: 1583 - DNA, 201 bp, Homo sapiens
gaggacagttcctggactgatttcttcaacccaatctcacaccccatgggacgaggtcatcaagcaggaagaaggatggatatggactccagtcatagtayaacgcttcagcctactgcaaatccaaacacaggtttggtggaagatttggacaggacaggacctctttcaatgacaacgcagcagagtaattctcagagc

SEQ ID NO: 1584 - DNA, 201 bp, Homo sapiens
tcaccgacagcacagacagaatccctgctaccactttgatgagcactagtgctacagcaactgagacagcaaccaagaggcaagaaacctgggattggttytcatggttgtttctaccatcagagtcaaagaatcatcttcacacaacaacacaaatggctggtacgtcttcaaataccatctcagcaggctgggagccaa

SEQ ID NO: 1585 - DNA, 201 bp, Homo sapiens
caagcacaatccaggcaactcctagtagtacaacggaagaaacagctacccagaaggaacagtggtttggcaacagatggcatgagggatatcgccaaacmcccagagaagactcccattcgacaacagggacagctgcagcctcagctcataccagccatccaatgcaaggaaggacaacaccaagcccagaggacagtt

SEQ ID NO: 1586 - DNA, 201 bp, Homo sapiens; identical to SEQ ID NO: 1563

SEQ ID NO: 1587 - DNA, 201 bp, Homo sapiens; identical to SEQ ID NO: 1564

SEQ ID NO: 1588 - DNA, 201 bp, Homo sapiens
tttctggatcaggcattgatgatgatgaagattttatctccagcaccatttcaaccacaccacgggcttttgaccacacaaaacagaaccaggactggacycagtggaacccaagccattcaaatccggaagtgctacttcagacaaccacaaggatgactgatgtagacagaaatggcaccactgcttatgaaggaaact

SEQ ID NO: 1589 - DNA, 201 bp, Homo sapiens
acaatccaggcaactcctagtagtacaacggaagaaacagctacccagaaggaacagtggtttggcaacagatggcatgagggatatcgccaaacacccaragaagactcccattcgacaacagggacagctgcagcctcagctcataccagccatccaatgcaaggaaggacaacaccaagcccagaggacagttcctgg

SEQ ID NO: 1590 - DNA, 201 bp, Homo sapiens
ccacaaggatgactgatgtagacagaaatggcaccactgcttatgaaggaaactggaacccagaagcacaccctcccctcattcaccatgagcatcatgargaagaagagaccccacattctacaagcacaatccaggcaactcctagtagtacaacggaagaaacagctacccagaaggaacagtggtttggcaacagat

SEQ ID NO: 1591 - DNA, 201 bp, Homo sapiens; identical to SEQ ID NO: 1565

SEQ ID NO: 1592 - DNA, 201 bp, Homo sapiens; identical to SEQ ID NO: 1566

SEQ ID NO: 1593 - DNA, 201 bp, Homo sapiens; identical to SEQ ID NO: 1567

SEQ ID NO: 1594 - DNA, 201 bp, Homo sapiens; identical to SEQ ID NO: 1569

SEQ ID NO: 1595 - DNA, 201 bp, Homo sapiens
aacccagaagcacaccctcccctcattcaccatgagcatcatgaggaagaagagaccccacattctacaagcacaatccaggcaactcctagtagtacaayggaagaaacagctacccagaaggaacagtggtttggcaacagatggcatgagggatatcgccaaacacccagagaagactcccattcgacaacagggaca

SEQ ID NO: 1596 - DNA, 201 bp, Homo sapiens; identical to SEQ ID NO: 1568

SEQ ID NO: 1597 - DNA, 201 bp, Homo sapiens; identical to SEQ ID NO: 1560

SEQ ID NO: 1598 - DNA, 201 bp, Homo sapiens; identical to SEQ ID NO: 1581

SEQ ID NO: 1599 - DNA, 201 bp, Homo sapiens; identical to SEQ ID NO: 1561

SEQ ID NO: 1600 - DNA, 201 bp, Homo sapiens; identical to SEQ ID NO: 1583

SEQ ID NO: 1601 - DNA, 201 bp, Homo sapiens; identical to SEQ ID NO: 1584

SEQ ID NO: 1602 - DNA, 201 bp, Homo sapiens; identical to SEQ ID NO: 1585

SEQ ID NO: 1603 - DNA, 201 bp, Homo sapiens; identical to SEQ ID NO: 1563

SEQ ID NO: 1604 - DNA, 201 bp, Homo sapiens; identical to SEQ ID NO: 1564

SEQ ID NO: 1605 - DNA, 201 bp, Homo sapiens; identical to SEQ ID NO: 1588

SEQ ID NO: 1606 - DNA, 201 bp, Homo sapiens; identical to SEQ ID NO: 1589

SEQ ID NO: 1607 - DNA, 201 bp, Homo sapiens; identical to SEQ ID NO: 1590

SEQ ID NO: 1608 - DNA, 201 bp, Homo sapiens; identical to SEQ ID NO: 1565

SEQ ID NO: 1609 - DNA, 201 bp, Homo sapiens; identical to SEQ ID NO: 1566

SEQ ID NO: 1610 - DNA, 201 bp, Homo sapiens; identical to SEQ ID NO: 1567

SEQ ID NO: 1611 - DNA, 201 bp, Homo sapiens; identical to SEQ ID NO: 1569

SEQ ID NO: 1612 - DNA, 201 bp, Homo sapiens; identical to SEQ ID NO: 1595

SEQ ID NO: 1613 - DNA, 201 bp, Homo sapiens; identical to SEQ ID NO: 1568

SEQ ID NO: 1614 - DNA, 201 bp, Homo sapiens; identical to SEQ ID NO: 1560

SEQ ID NO: 1615 - DNA, 201 bp, Homo sapiens; identical to SEQ ID NO: 1561

SEQ ID NO: 1616 - DNA, 201 bp, Homo sapiens; identical to SEQ ID NO: 1564

SEQ ID NO: 1617 - DNA, 201 bp, Homo sapiens; identical to SEQ ID NO: 1565

SEQ ID NO: 1618 - DNA, 201 bp, Homo sapiens; identical to SEQ ID NO: 1566

SEQ ID NO: 1619 - DNA, 201 bp, Homo sapiens; identical to SEQ ID NO: 1567

SEQ ID NO: 1620 - DNA, 201 bp, Homo sapiens
gttggaaacataaccattacagggagctgggacacttaacagatgcaatgtgctactgattgtttcattgcgaatcttttttagcataaaattttctactytttcccccaccagctaaggacatttcccagggttaatagggcctggtccctgggaggaaatttgaatgggtccattttgcccttccatagcctaatccct

SEQ ID NO: 1621 - DNA, 201 bp, Homo sapiens; identical to SEQ ID NO: 1569

SEQ ID NO: 1622 - DNA, 201 bp, Homo sapiens; identical to SEQ ID NO: 1560

SEQ ID NO: 1623 - DNA, 201 bp, Homo sapiens
ggaaactggaacccagaagcacaccctcccctcattcaccatgagcatcatgaggaagaagagaccccacattctacaagcacaacagcctcagctcatamcagccatccaatgcaaggaaggacaacaccaagcccagaggacagttcctggactgatttcttcaacccaatctcacaccccatgggacgaggtcatcaa

SEQ ID NO: 1624 - DNA, 201 bp, Homo sapiens; identical to SEQ ID NO: 1561

SEQ ID NO: 1625 - DNA, 201 bp, Homo sapiens; identical to SEQ ID NO: 1583

SEQ ID NO: 1626 - DNA, 201 bp, Homo sapiens
gctcctccagtgaaaggagcagcacttcaggagctttgatgagcactagtgctacagcaactgagacagcaaccaagaggcaagaaacctgggattggttytcatggttgtttctaccatcagagtcaaagaatcatcttcacacaacaacacaaatggctggtacgtcttcaaataccatctcagcaggctgggagccaa

SEQ ID NO: 1627 - DNA, 201 bp, Homo sapiens; identical to SEQ ID NO: 1563

SEQ ID NO: 1628 - DNA, 201 bp, Homo sapiens; identical to SEQ ID NO: 1564

SEQ ID NO: 1629 - DNA, 201 bp, Homo sapiens; identical to SEQ ID NO: 1588

SEQ ID NO: 1630 - DNA, 201 bp, Homo sapiens; identical to SEQ ID NO: 1566

SEQ ID NO: 1631 - DNA, 201 bp, Homo sapiens
ccacaaggatgactgatgtagacagaaatggcaccactgcttatgaaggaaactggaacccagaagcacaccctcccctcattcaccatgagcatcatgargaagaagagaccccacattctacaagcacaacagcctcagctcataccagccatccaatgcaaggaaggacaacaccaagcccagaggacagttcctgga

SEQ ID NO: 1632 - DNA, 201 bp, Homo sapiens; identical to SEQ ID NO: 1565

SEQ ID NO: 1633 - DNA, 201 bp, Homo sapiens; identical to SEQ ID NO: 1567

SEQ ID NO: 1634 - DNA, 201 bp, Homo sapiens; identical to SEQ ID NO: 1569

SEQ ID NO: 1635 - DNA, 201 bp, Homo sapiens; identical to SEQ ID NO: 1568

SEQ ID NO: 1636 - DNA, 201 bp, Homo sapiens; identical to SEQ ID NO: 1561

SEQ ID NO: 1637 - DNA, 201 bp, Homo sapiens; identical to SEQ ID NO: 1563

SEQ ID NO: 1638 - DNA, 201 bp, Homo sapiens; identical to SEQ ID NO: 1564

SEQ ID NO: 1639 - DNA, 201 bp, Homo sapiens; identical to SEQ ID NO: 1566

SEQ ID NO: 1640 - DNA, 201 bp, Homo sapiens
tggcttctaagacatttcccagggttaatagggcctggtccctgggaggaaatttgaatgggtccattttgcccttccatagcctaatccctgggcattgytttccactgaggttgggggttggggtgtactagttacacatcttcaacagaccccctctagaaatttttcagatgcttctgggagacacccaaagggtga

SEQ ID NO: 1641 - DNA, 201 bp, Homo sapiens; identical to SEQ ID NO: 1568

SEQ ID NO: 1642 - DNA, 201 bp, Homo sapiens; identical to SEQ ID NO: 1569

SEQ ID NO: 1643 - DNA, 201 bp, Homo sapiens; identical to SEQ ID NO: 1560

SEQ ID NO: 1644 - DNA, 201 bp, Homo sapiens; identical to SEQ ID NO: 1561

SEQ ID NO: 1645 - DNA, 201 bp, Homo sapiens; identical to SEQ ID NO: 1572

SEQ ID NO: 1646 - DNA, 201 bp, Homo sapiens; identical to SEQ ID NO: 1563

SEQ ID NO: 1647 - DNA, 201 bp, Homo sapiens; identical to SEQ ID NO: 1564

SEQ ID NO: 1648 - DNA, 201 bp, Homo sapiens; identical to SEQ ID NO: 1565

SEQ ID NO: 1649 - DNA, 201 bp, Homo sapiens; identical to SEQ ID NO: 1566

SEQ ID NO: 1650 - DNA, 201 bp, Homo sapiens; identical to SEQ ID NO: 1640

SEQ ID NO: 1651 - DNA, 201 bp, Homo sapiens; identical to SEQ ID NO: 1568

SEQ ID NO: 1652 - DNA, 201 bp, Homo sapiens; identical to SEQ ID NO: 1569

SEQ ID NO: 1653 - DNA, 201 bp, Homo sapiens; identical to SEQ ID NO: 1560

SEQ ID NO: 1654 - DNA, 201 bp, Homo sapiens; identical to SEQ ID NO: 1623

SEQ ID NO: 1655 - DNA, 201 bp, Homo sapiens; identical to SEQ ID NO: 1561

SEQ ID NO: 1656 - DNA, 201 bp, Homo sapiens; identical to SEQ ID NO: 1583

SEQ ID NO: 1657 - DNA, 201 bp, Homo sapiens
tcaccgacagcacagacagaatccctgctaccactttgatgagcactagtgctacagcaactgagacagcaaccaagaggcaagaaacctgggattggttytcatggttgtttctaccatcagagtcaaagaatcatcttcacacaacaacacaaatggctgcaggctgggagccaaatgaagaaaatgaagatgaaagag

SEQ ID NO: 1658 - DNA, 201 bp, Homo sapiens; identical to SEQ ID NO: 1563

SEQ ID NO: 1659 - DNA, 201 bp, Homo sapiens; identical to SEQ ID NO: 1564

SEQ ID NO: 1660 - DNA, 201 bp, Homo sapiens; identical to SEQ ID NO: 1588

SEQ ID NO: 1661 - DNA, 201 bp, Homo sapiens; identical to SEQ ID NO: 1566

SEQ ID NO: 1662 - DNA, 201 bp, Homo sapiens; identical to SEQ ID NO: 1631

SEQ ID NO: 1663 - DNA, 201 bp, Homo sapiens; identical to SEQ ID NO: 1565

SEQ ID NO: 1664 - DNA, 201 bp, Homo sapiens; identical to SEQ ID NO: 1640

SEQ ID NO: 1665 - DNA, 201 bp, Homo sapiens; identical to SEQ ID NO: 1569

SEQ ID NO: 1666 - DNA, 201 bp, Homo sapiens; identical to SEQ ID NO: 1568

SEQ ID NO: 1667 - DNA, 201 bp, Homo sapiens; identical to SEQ ID NO: 1560

SEQ ID NO: 1668 - DNA, 201 bp, Homo sapiens; identical to SEQ ID NO: 1561

SEQ ID NO: 1669 - DNA, 201 bp, Homo sapiens
accttttctactgtacaccccatcccagacgaagacagtccctggatcaccgacagcacagacagaatccctgctaccaatatggactccagtcatagtayaacgcttcagcctactgcaaatccaaacacaggtttggtggaagatttggacaggacaggacctctttcaatgacaacgcgagaccaagacacattccac

SEQ ID NO: 1670 - DNA, 201 bp, Homo sapiens; identical to SEQ ID NO: 1563

SEQ ID NO: 1671 - DNA, 201 bp, Homo sapiens; identical to SEQ ID NO: 1564

SEQ ID NO: 1672 - DNA, 201 bp, Homo sapiens; identical to SEQ ID NO: 1565

SEQ ID NO: 1673 - DNA, 201 bp, Homo sapiens; identical to SEQ ID NO: 1566

SEQ ID NO: 1674 - DNA, 201 bp, Homo sapiens; identical to SEQ ID NO: 1567

SEQ ID NO: 1675 - DNA, 201 bp, Homo sapiens; identical to SEQ ID NO: 1568

SEQ ID NO: 1676 - DNA, 201 bp, Homo sapiens; identical to SEQ ID NO: 1569

SEQ ID NO: 1677 - DNA, 201 bp, Homo sapiens
ccatgtctgtgaagcacttgtggaccattcaagattgtggaagaatcactcaagagaaggagatagcaatatttgcagatatgcaaactggccccttgcakgcaaatcctggagcacgtcctggagcctttagaggagacggctgctgctgttccagtctctccttaggcagacttgagtttctacccactcttcccaagc

SEQ ID NO: 1678 - DNA, 201 bp, Homo sapiens
gtctgtgaagcacttgtggaccattcaagattgtggaagaatcactcaagagaaggagatagcaatatttgcagatatgcaaactggccccttgcatgcamatcctggagcacgtcctggagcctttagaggagacggctgctgctgttccagtctctccttaggcagacttgagtttctacccactcttcccaagcagcc

SEQ ID NO: 1679 - DNA, 201 bp, Homo sapiens
cccagacaaccagtagtcaccattccaagtgaggggtggctgcaactctacagccccgttcgtctctcctcactgtcaaagctgctgagaccccagactcracacttgaaagaaacccatgtctgtgaagcacttgtggaccattcaagattgtggaagaatcactcaagagaaggagatagcaatatttgcagatatgca

SEQ ID NO: 1680 - DNA, 201 bp, Homo sapiens
gaggcacagaccactcaacccacagccacggaggcacagaccactccactggcagccatggaggccctgtccacagaacccagtgccacagaggccctgtycatggaacctactaccaaaagaggtctgttcatacccttttctgtgtcctctgttactcacaagggcattcccatggcagccagcaatttgtccgtcaac

SEQ ID NO: 1681 - DNA, 201 bp, Homo sapiens
gaccactccaccagcagccatggaggcacagaccactcaaaccacagccatggaggcacagaccactgcaccagaagccacggaggcacagaccactcaayccacagccacggaggcacagaccactccactggcagccatggaggccctgtccacagaacccagtgccacagaggccctgtccatggaacctactaccaa

SEQ ID NO: 1682 - DNA, 201 bp, Homo sapiens
ctgttgctgatcctactgggccctggcaacagcttgcagctgtgggacacctgggcagatgaagccgagaaagccttgggtcccctgcttgcccgggaccrgagacaggccaccgaatatgagtacctagattatgatttcctgccagaaacggagcctccagaaatgctgaggaacagcactgacaccactcctctgact

SEQ ID NO: 1683 - DNA, 201 bp, Homo sapiens
agaaagccttgggtcccctgcttgcccgggaccggagacaggccaccgaatatgagtacctagattatgatttcctgccagaaacggagcctccagaaatrctgaggaacagcactgacaccactcctctgactgggcctggaacccctgagtctaccactgtggagcctgctgcaaggcgttctactggcctggatgcag

SEQ ID NO: 1684 - DNA, 201 bp, Homo sapiens
accctgcacagcttcctcccttagctcactctgccatctgttttggcaagaccccacctccacgggctctcctgggccacccctgagtgcccagaccccawtccacagctctgggcttcctcggagacccctggggatggggatcttcagggaaggaactctggccacccaaacaggacaagagcagcctggggccaagca

SEQ ID NO: 1685 - DNA, 201 bp, Homo sapiens
cagagcccagggaggaccgtgagggggatgacctcaccctgcacagcttcctcccttagctcactctgccatctgttttggcaagaccccacctccacggkctctcctgggccacccctgagtgcccagaccccattccacagctctgggcttcctcggagacccctggggatggggatcttcagggaaggaactctggcc

SEQ ID NO: 1686 - DNA, 201 bp, Homo sapiens
ggcacagaccactcaacccacagccacggaggcacagaccactccactggcagccatggaggccctgtccacagaacccagtgccacagaggccctgtccrtggaacctactaccaaaagaggtctgttcatacccttttctgtgtcctctgttactcacaagggcattcccatggcagccagcaatttgtccgtcaacta

SEQ ID NO: 1687 - DNA, 201 bp, Homo sapiens
ttaggaatcattgaagttataaatctttggaatgagcaaactcagaatggtgctacttgaagactctggatctgctgacttcagaagacattttgtcaacytgagtcccttcaccattactgtggtcttacttctcagtgcctgttttgtcaccagttctcttggaggaacagacaaggagctgaggctagtggatggtga

SEQ ID NO: 1688 - DNA, 201 bp, Homo sapiens
ggtgtatatgagactttcaagggaattaaataaataaataagaatgttattgatttgagtttgctttaattacttgtccttaattctattaatttctaaaygggcttcctaattttttgtagagtttcctagatgtattataatgtgttttatttgacagtgtttcaatttgcatatacagtactgtatattttttcttat

SEQ ID NO: 1689 - DNA, 201 bp, Homo sapiens
tgtgttttatttgacagtgtttcaatttgcatatacagtactgtatattttttcttatttggtttgaataattttcctattaccaaataaaaataaatttwtttttactttagtttttctaagacaggaaaagttaatgatattgaagggtctgtaaataatatatggctaactttataaggcatgactcacaacgattct

SEQ ID NO: 1690 - DNA, 201 bp, Homo sapiens
atgtccaactgccgtcacagccattggtcgagttaacgccagtaagggatttggacacatctggcttgacagcgtttcttgccagggacatgaacctgctrtctggcaatgtaaacaccatgaatggggaaagcattattgcaatcacaatgaagatgctggcgtgacatgttctgatggatcagatctggagctaagact

SEQ ID NO: 1691 - DNA, 201 bp, Homo sapiens
aggatgctggagtgatttgctcaaagggagcagatctgagcctgagactggtagatggagtcactgaatgttcaggaagattagaagtgagattccaaggrgaatgggggacaatatgtgatgacggctgggacagttacgatgctgctgtggcatgcaagcaactgggatgtccaactgccgtcacagccattggtcgag

SEQ ID NO: 1692 - DNA, 201 bp, Homo sapiens
aatggacagatctgggctgaagaattccagtgtgagggacatgagtcccatctttcactctgcccagtagcaccccgcccagaaggaacttgtagccacarcagggatgttggagtagtctgctcaagatacacagaaattcgcttggtgaatggcaagaccccgtgtgagggcagagtggagctcaaaacgcttggtgcc

SEQ ID NO: 1693 - DNA, 201 bp, Homo sapiens
ggggggagctcactttggagagggaaatggacagatctgggctgaagaattccagtgtgagggacatgagtcccatctttcactctgcccagtagcacccygcccagaaggaacttgtagccacagcagggatgttggagtagtctgctcaagatacacagaaattcgcttggtgaatggcaagaccccgtgtgagggcag

SEQ ID NO: 1694 - DNA, 201 bp, Homo sapiens
gctcagcccacagggaacccagactggttggaggggacattccctgttctggacgtgttgaagtgaagcatggtgacacgtggggctccatctgtgattcrgacttctctctggaagctgccagcgttctatgcagggaattacagtgtggcacagttgtctctatcctggggggagctcactttggagagggaaatggac

SEQ ID NO: 1695 - DNA, 201 bp, Homo sapiens
ggctgtgcagacaaagggaaaatcaaccctgcatctttagacaaggccatgtccattcccatgtgggtggacaatgttcagtgtccaaaaggacctgacaygctgtggcagtgcccatcatctccatgggagaagagactggccagcccctcggaggagacctggatcacatgtgacaacaagataagacttcaggaagga

SEQ ID NO: 1696 - DNA, 201 bp, Homo sapiens
gttgttttctttagaagaacatttctagggaataatacaagaagatttaggaatcattgaagttataaatctttggaatgagcaaactcagaatggtgctrcttgaagactctggatctgctgacttcagaagacattttgtcaacctgagtcccttcaccattactgtggtcttacttctcagtgcctgttttgtcacca

SEQ ID NO: 1697 - DNA, 201 bp, Homo sapiens
ggcctgtgcagggcgtctggaagttttttacaatggagcttggggcactgttggcaagagtagcatgtctgaaaccactgtgggtgtggtgtgcaggcagytgggctgtgcagacaaagggaaaatcaaccctgcatctttagacaaggccatgtccattcccatgtgggtggacaatgttcagtgtccaaaaggacctga

SEQ ID NO: 1698 - DNA, 201 bp, Homo sapiens; identical to SEQ ID NO: 1687

SEQ ID NO: 1699 - DNA, 201 bp, Homo sapiens; identical to SEQ ID NO: 1688

SEQ ID NO: 1700 - DNA, 201 bp, Homo sapiens; identical to SEQ ID NO: 1689

SEQ ID NO: 1701 - DNA, 201 bp, Homo sapiens; identical to SEQ ID NO: 1690

SEQ ID NO: 1702 - DNA, 201 bp, Homo sapiens; identical to SEQ ID NO: 1691

SEQ ID NO: 1703 - DNA, 201 bp, Homo sapiens
ctgcccagtagcaccccgcccagaaggaacttgtagccacagcagggatgttggagtagtctgctcaagtaagacccagaaaacatctttaattggttctyatactgtgaaagggacagggttagggagtcatagctgtctttttctaaagccctgtctccttccaggatacacagaaattcgcttggtgaatggcaagac

SEQ ID NO: 1704 - DNA, 201 bp, Homo sapiens
aatggacagatctgggctgaagaattccagtgtgagggacatgagtcccatctttcactctgcccagtagcaccccgcccagaaggaacttgtagccacarcagggatgttggagtagtctgctcaagtaagacccagaaaacatctttaattggttctcatactgtgaaagggacagggttagggagtcatagctgtctt

SEQ ID NO: 1705 - DNA, 201 bp, Homo sapiens
ggggggagctcactttggagagggaaatggacagatctgggctgaagaattccagtgtgagggacatgagtcccatctttcactctgcccagtagcacccygcccagaaggaacttgtagccacagcagggatgttggagtagtctgctcaagtaagacccagaaaacatctttaattggttctcatactgtgaaagggac

SEQ ID NO: 1706 - DNA, 201 bp, Homo sapiens; identical to SEQ ID NO: 1694

SEQ ID NO: 1707 - DNA, 201 bp, Homo sapiens
ttgcctgaatgcagatgatctggacctaatgaattcctcagaaaattcccatgagtcagctgatttcagtgctgctgaactaatttctgtgtctaaatttmttcctatttctggaatggaaaaggaggccattctgagccacactgaaaaggaaaatgggaatttataacccagtgagttcagcctttaagataccttgat

SEQ ID NO: 1708 - DNA, 201 bp, Homo sapiens; identical to SEQ ID NO: 1695

SEQ ID NO: 1709 - DNA, 201 bp, Homo sapiens; identical to SEQ ID NO: 1696

SEQ ID NO: 1710 - DNA, 201 bp, Homo sapiens; identical to SEQ ID NO: 1697

SEQ ID NO: 1711 - DNA, 201 bp, Homo sapiens; identical to SEQ ID NO: 1687

SEQ ID NO: 1712 - DNA, 201 bp, Homo sapiens; identical to SEQ ID NO: 1688

SEQ ID NO: 1713 - DNA, 201 bp, Homo sapiens; identical to SEQ ID NO: 1689

SEQ ID NO: 1714 - DNA, 201 bp, Homo sapiens; identical to SEQ ID NO: 1690

SEQ ID NO: 1715 - DNA, 201 bp, Homo sapiens; identical to SEQ ID NO: 1691

SEQ ID NO: 1716 - DNA, 201 bp, Homo sapiens; identical to SEQ ID NO: 1692

SEQ ID NO: 1717 - DNA, 201 bp, Homo sapiens; identical to SEQ ID NO: 1693

SEQ ID NO: 1718 - DNA, 201 bp, Homo sapiens; identical to SEQ ID NO: 1694

SEQ ID NO: 1719 - DNA, 201 bp, Homo sapiens; identical to SEQ ID NO: 1707

SEQ ID NO: 1720 - DNA, 201 bp, Homo sapiens; identical to SEQ ID NO: 1695

SEQ ID NO: 1721 - DNA, 201 bp, Homo sapiens; identical to SEQ ID NO: 1696

SEQ ID NO: 1722 - DNA, 201 bp, Homo sapiens; identical to SEQ ID NO: 1697

SEQ ID NO: 1723 - DNA, 201 bp, Homo sapiens; identical to SEQ ID NO: 1687

SEQ ID NO: 1724 - DNA, 201 bp, Homo sapiens; identical to SEQ ID NO: 1688

SEQ ID NO: 1725 - DNA, 201 bp, Homo sapiens; identical to SEQ ID NO: 1689

SEQ ID NO: 1726 - DNA, 201 bp, Homo sapiens; identical to SEQ ID NO: 1690

SEQ ID NO: 1727 - DNA, 201 bp, Homo sapiens; identical to SEQ ID NO: 1691

SEQ ID NO: 1728 - DNA, 201 bp, Homo sapiens; identical to SEQ ID NO: 1692

SEQ ID NO: 1729 - DNA, 201 bp, Homo sapiens
tgaattcctcaggtctgtgggttcttggagggtctattgcccaggggttcagatcagtggctgcagttgaggcacagacattctactttgataaacagttwaaaaagtctaaaaatgtaataggaagcttagatgcatataatggacaagaatgactgaaaattattcttggagaatatcaaaattgcaatcatagggagg

SEQ ID NO: 1730 - DNA, 201 bp, Homo sapiens; identical to SEQ ID NO: 1693

SEQ ID NO: 1731 - DNA, 201 bp, Homo sapiens; identical to SEQ ID NO: 1694

SEQ ID NO: 1732 - DNA, 201 bp, Homo sapiens
aggatgactttactgggttggaagaaatatcccaaaacccattgtctttactccatgaagggtccctgaccttctgagaggggcctgcctcacttcttccrtccaaagaattatgcatctgctactgtgtcagggaacatatttaaggaacatgtactgttactgtgtcaggaaacatatttaagaaataggaaagacttt

SEQ ID NO: 1733 - DNA, 201 bp, Homo sapiens
aggtctggtttatttcccagtaattattttcttcctttcagaaaattcccatgagtcagctgatttcagtgctgctgaactaatttctgtgtctaaatttmttcctatttctggaatggaaaaggaggccattctgagccacactgaaaaggaaaatgggaatttataacccagtgagttcagcctttaagataccttgat

SEQ ID NO: 1734 - DNA, 201 bp, Homo sapiens; identical to SEQ ID NO: 1695

SEQ ID NO: 1735 - DNA, 201 bp, Homo sapiens; identical to SEQ ID NO: 1696

SEQ ID NO: 1736 - DNA, 201 bp, Homo sapiens; identical to SEQ ID NO: 1697

SEQ ID NO: 1737 - DNA, 201 bp, Homo sapiens; identical to SEQ ID NO: 1729

SEQ ID NO: 1738 - DNA, 201 bp, Homo sapiens; identical to SEQ ID NO: 1732

SEQ ID NO: 1739 - DNA, 201 bp, Homo sapiens; identical to SEQ ID NO: 1695

SEQ ID NO: 1740 - DNA, 201 bp, Homo sapiens; identical to SEQ ID NO: 1697

SEQ ID NO: 1741 - DNA, 201 bp, Homo sapiens; identical to SEQ ID NO: 1691

SEQ ID NO: 1742 - DNA, 201 bp, Homo sapiens; identical to SEQ ID NO: 1692

SEQ ID NO: 1743 - DNA, 201 bp, Homo sapiens; identical to SEQ ID NO: 1693

SEQ ID NO: 1744 - DNA, 201 bp, Homo sapiens; identical to SEQ ID NO: 1694

SEQ ID NO: 1745 - DNA, 201 bp, Homo sapiens; identical to SEQ ID NO: 1733

SEQ ID NO: 1746 - DNA, 201 bp, Homo sapiens; identical to SEQ ID NO: 1696

SEQ ID NO: 1747 - DNA, 201 bp, Homo sapiens; identical to SEQ ID NO: 1687

SEQ ID NO: 1748 - DNA, 201 bp, Homo sapiens; identical to SEQ ID NO: 1690

SEQ ID NO: 1749 - DNA, 201 bp, Homo sapiens
cacctcgggcccagataacaggataccgactgaccgtgggccttacccgaagaggacagcccaggcagtacaatgtgggtccctctgtctccaagtacccmctgaggaatctgcagcctgcatctgagtacaccgtatccctcgtggccataaagggcaaccaagagagccccaaagccactggagtctttaccacactgc

SEQ ID NO: 1750 - DNA, 201 bp, Homo sapiens
tcatcctgttggcactgatgaagaacccttacagttcagggttcctggaacttctaccagtgccactctgacaggcctcaccagaggtgccacctacaacrtcatagtggaggcactgaaagaccagcagaggcataaggttcgggaagaggttgttaccgtgggcaactctgtcaacgaaggcttgaaccaacctacgga

SEQ ID NO: 1751 - DNA, 201 bp, Homo sapiens
ttttaggcggaccacaccgcccacaacggccacccccataaggcataggccaagaccatacccgccgaatgtaggacaagaagctctctctcagacaaccrtctcatgggccccattccaggacacttctgagtacatcatttcatgtcatcctgttggcactgatgaagaacccttacagttcagggttcctggaacttc

SEQ ID NO: 1752 - DNA, 201 bp, Homo sapiens
acagtactcactttttccaaatgatcctagtaattgcctagaaatatctttctcttacctgttatttatcaatttttcccagtatttttatacggaaaaarttgtattgaaaacacttagtatgcagttgataagaggaatttggtataattatggtgggtgattattttttatactgtatgtgccaaagctttactactg

SEQ ID NO: 1753 - DNA, 201 bp, Homo sapiens
agtttgtcaatgaaactgattctactgtcctggtgagatggactccacctcgggcccagataacaggataccgactgaccgtgggccttacccgaagaggmcagcccaggcagtacaatgtgggtccctctgtctccaagtacccactgaggaatctgcagcctgcatctgagtacaccgtatccctcgtggccataaagg

SEQ ID NO: 1754 - DNA, 201 bp, Homo sapiens
ccgaaaatacattgtaaatgtctatcagatatctgaggatggggagcagagtttgatcctgtctacttcacaaacaacagcgcctgatgccccacctgacmcgactgtggaccaagttgatgacacctcaattgttgttcgctggagcagaccccaggctcccatcacagggtacagaatagtctattcgccatcagtaga

SEQ ID NO: 1755 - DNA, 201 bp, Homo sapiens
acagctcatccgtggttgtatcaggacttatggtggccaccaaatatgaagtgagtgtctatgctcttaaggacactttgacaagcagaccagctcagggwgttgtcaccactctggagaatgtcagcccaccaagaagggctcgtgtgacagatgctactgagaccaccatcaccattagctggagaaccaagactgaga

SEQ ID NO: 1756 - DNA, 201 bp, Homo sapiens
gcaaacttggtggcaacttgcctcccggtgcgggcgtctctcccccaccgtctcaacatgcttaggggtccggggcccgggctgctgctgctggccgtccwgtgcctggggacagcggtgccctccacgggagcctcgaagagcaagaggcaggctcagcaaatggttcagccccagtccccggtggctgtcagtcaaagc

SEQ ID NO: 1757 - DNA, 201 bp, Homo sapiens
ttcctggccgaaaatacattgtaaatgtctatcagatatctgaggatggggagcagagtttgatcctgtctacttcacaaacaacagcgcctgatgccccwcctgacccgactgtggaccaagttgatgacacctcaattgttgttcgctggagcagaccccaggctcccatcacagggtacagaatagtctattcgccat

SEQ ID NO: 1758 - DNA, 201 bp, Homo sapiens
agtgggaccgtcagggagaaaatggccagatgatgagctgcacatgtcttgggaacggaaaaggagaattcaagtgtgaccctcatgaggcaacgtgttaygatgatgggaagacataccacgtaggagaacagtggcagaaggaatatctcggtgccatttgctcctgcacatgctttggaggccagcggggctggcgct

SEQ ID NO: 1759 - DNA, 201 bp, Homo sapiens
cgagggacctggaagttgttgctgcgacccccaccagcctactgatcagctgggatgctcctgctgtcacagtgagatattacaggatcacttacggagaracaggaggaaatagccctgtccaggagttcactgtgcctgggagcaagtctacagctaccatcagcggccttaaacctggagttgattataccatcactg

SEQ ID NO: 1760 - DNA, 201 bp, Homo sapiens
tgtctctctgccaagatccatctaaactggagtgatgttagcagacccagcttagagttcttctttctttcttaagccctttgctctggaggaagttctcyagcttcagctcaactcacagcttctccaagcatcaccctgggagtttcctgagggttttctcataaatgagggctgcacattgcctgttctgcttcgaag

SEQ ID NO: 1761 - DNA, 201 bp, Homo sapiens
ctgaagagacttgctttgacaagtacactgggaacacttaccgagtgggtgacacttatgagcgtcctaaagactccatgatctgggactgtacctgcatyggggctgggcgagggagaataagctgtaccatcgcaaaccgctgccatgaagggggtcagtcctacaagattggtgacacctggaggagaccacatgaga

SEQ ID NO: 1762 - DNA, 201 bp, Homo sapiens
ttctactgtcctggtgagatggactccacctcgggcccagataacaggataccgactgaccgtgggccttacccgaagaggacagcccaggcagtacaatrtgggtccctctgtctccaagtacccactgaggaatctgcagcctgcatctgagtacaccgtatccctcgtggccataaagggcaaccaagagagccccaa

SEQ ID NO: 1763 - DNA, 201 bp, Homo sapiens
cctggaacttctaccagtgccactctgacaggcctcaccagaggtgccacctacaacatcatagtggaggcactgaaagaccagcagaggcataaggttcrggaagaggttgttaccgtgggcaactctgtcaacgaaggcttgaaccaacctacggatgactcgtgctttgacccctacacagtttcccattatgccgtt

SEQ ID NO: 1764 - DNA, 201 bp, Homo sapiens; identical to SEQ ID NO: 1761

SEQ ID NO: 1765 - DNA, 201 bp, Homo sapiens; identical to SEQ ID NO: 1756

SEQ ID NO: 1766 - DNA, 201 bp, Homo sapiens; identical to SEQ ID NO: 1749

SEQ ID NO: 1767 - DNA, 201 bp, Homo sapiens; identical to SEQ ID NO: 1750

SEQ ID NO: 1768 - DNA, 201 bp, Homo sapiens
cgaatatacaatttatgtcattgccctgaagaataatcagaagagcgagcccctgattggaaggaaaaagacaggacaagaagctctctctcagacaaccrtctcatgggccccattccaggacacttctgagtacatcatttcatgtcatcctgttggcactgatgaagaacccttacagttcagggttcctggaacttc

SEQ ID NO: 1769 - DNA, 201 bp, Homo sapiens; identical to SEQ ID NO: 1753

SEQ ID NO: 1770 - DNA, 201 bp, Homo sapiens; identical to SEQ ID NO: 1755

SEQ ID NO: 1771 - DNA, 201 bp, Homo sapiens; identical to SEQ ID NO: 1759

SEQ ID NO: 1772 - DNA, 201 bp, Homo sapiens; identical to SEQ ID NO: 1752

SEQ ID NO: 1773 - DNA, 201 bp, Homo sapiens
ccgaaaatacattgtaaatgtctatcagatatctgaggatggggagcagagtttgatcctgtctacttcacaaacaacagcgcctgatgccccacctgacmcgactgtggaccaagttgatgacacctcaattgttgttcgctggagcagaccccaggctcccatcacaggtcagctaaaatagtctattcgccatcagta

SEQ ID NO: 1774 - DNA, 201 bp, Homo sapiens; identical to SEQ ID NO: 1756

SEQ ID NO: 1775 - DNA, 201 bp, Homo sapiens
ttcctggccgaaaatacattgtaaatgtctatcagatatctgaggatggggagcagagtttgatcctgtctacttcacaaacaacagcgcctgatgccccwcctgacccgactgtggaccaagttgatgacacctcaattgttgttcgctggagcagaccccaggctcccatcacaggtcagctaaaatagtctattcgcc

SEQ ID NO: 1776 - DNA, 201 bp, Homo sapiens
gccctaaaggactggcattcactgatgtggatgtcgattccatcaaaattgcttgggaaagcccacaggggcaagtttccaggtacagggtgacctactckagccctgaggatggaatccatgagctattccctgcacctgatggtgaagaagacactgcagagctgcaaggcctcagaccgggttctgagtacacagtca

SEQ ID NO: 1777 - DNA, 201 bp, Homo sapiens; identical to SEQ ID NO: 1758

SEQ ID NO: 1778 - DNA, 201 bp, Homo sapiens; identical to SEQ ID NO: 1760

SEQ ID NO: 1779 - DNA, 201 bp, Homo sapiens; identical to SEQ ID NO: 1761

SEQ ID NO: 1780 - DNA, 201 bp, Homo sapiens; identical to SEQ ID NO: 1762

SEQ ID NO: 1781 - DNA, 201 bp, Homo sapiens; identical to SEQ ID NO: 1763

SEQ ID NO: 1782 - DNA, 201 bp, Homo sapiens; identical to SEQ ID NO: 1749

SEQ ID NO: 1783 - DNA, 201 bp, Homo sapiens; identical to SEQ ID NO: 1753

SEQ ID NO: 1784 - DNA, 201 bp, Homo sapiens; identical to SEQ ID NO: 1754

SEQ ID NO: 1785 - DNA, 201 bp, Homo sapiens; identical to SEQ ID NO: 1756

SEQ ID NO: 1786 - DNA, 201 bp, Homo sapiens; identical to SEQ ID NO: 1755

SEQ ID NO: 1787 - DNA, 201 bp, Homo sapiens; identical to SEQ ID NO: 1776

SEQ ID NO: 1788 - DNA, 201 bp, Homo sapiens; identical to SEQ ID NO: 1757

SEQ ID NO: 1789 - DNA, 201 bp, Homo sapiens; identical to SEQ ID NO: 1759

SEQ ID NO: 1790 - DNA, 201 bp, Homo sapiens; identical to SEQ ID NO: 1761

SEQ ID NO: 1791 - DNA, 201 bp, Homo sapiens; identical to SEQ ID NO: 1762

SEQ ID NO: 1792 - DNA, 201 bp, Homo sapiens; identical to SEQ ID NO: 1749

SEQ ID NO: 1793 - DNA, 201 bp, Homo sapiens; identical to SEQ ID NO: 1750

SEQ ID NO: 1794 - DNA, 201 bp, Homo sapiens; identical to SEQ ID NO: 1751

SEQ ID NO: 1795 - DNA, 201 bp, Homo sapiens; identical to SEQ ID NO: 1753

SEQ ID NO: 1796 - DNA, 201 bp, Homo sapiens; identical to SEQ ID NO: 1755

SEQ ID NO: 1797 - DNA, 201 bp, Homo sapiens; identical to SEQ ID NO: 1759

SEQ ID NO: 1798 - DNA, 201 bp, Homo sapiens; identical to SEQ ID NO: 1752

SEQ ID NO: 1799 - DNA, 201 bp, Homo sapiens; identical to SEQ ID NO: 1754

SEQ ID NO: 1800 - DNA, 201 bp, Homo sapiens; identical to SEQ ID NO: 1756

SEQ ID NO: 1801 - DNA, 201 bp, Homo sapiens; identical to SEQ ID NO: 1757

SEQ ID NO: 1802 - DNA, 201 bp, Homo sapiens; identical to SEQ ID NO: 1776

SEQ ID NO: 1803 - DNA, 201 bp, Homo sapiens; identical to SEQ ID NO: 1758

SEQ ID NO: 1804 - DNA, 201 bp, Homo sapiens; identical to SEQ ID NO: 1760

SEQ ID NO: 1805 - DNA, 201 bp, Homo sapiens; identical to SEQ ID NO: 1761

SEQ ID NO: 1806 - DNA, 201 bp, Homo sapiens; identical to SEQ ID NO: 1762

SEQ ID NO: 1807 - DNA, 201 bp, Homo sapiens; identical to SEQ ID NO: 1763

SEQ ID NO: 1808 - DNA, 201 bp, Homo sapiens; identical to SEQ ID NO: 1749

SEQ ID NO: 1809 - DNA, 201 bp, Homo sapiens; identical to SEQ ID NO: 1750

SEQ ID NO: 1810 - DNA, 201 bp, Homo sapiens; identical to SEQ ID NO: 1751

SEQ ID NO: 1811 - DNA, 201 bp, Homo sapiens; identical to SEQ ID NO: 1752

SEQ ID NO: 1812 - DNA, 201 bp, Homo sapiens; identical to SEQ ID NO: 1753

SEQ ID NO: 1813 - DNA, 201 bp, Homo sapiens; identical to SEQ ID NO: 1773

SEQ ID NO: 1814 - DNA, 201 bp, Homo sapiens; identical to SEQ ID NO: 1755

SEQ ID NO: 1815 - DNA, 201 bp, Homo sapiens; identical to SEQ ID NO: 1756

SEQ ID NO: 1816 - DNA, 201 bp, Homo sapiens; identical to SEQ ID NO: 1775

SEQ ID NO: 1817 - DNA, 201 bp, Homo sapiens; identical to SEQ ID NO: 1758

SEQ ID NO: 1818 - DNA, 201 bp, Homo sapiens; identical to SEQ ID NO: 1759

SEQ ID NO: 1819 - DNA, 201 bp, Homo sapiens; identical to SEQ ID NO: 1760

SEQ ID NO: 1820 - DNA, 201 bp, Homo sapiens; identical to SEQ ID NO: 1761

SEQ ID NO: 1821 - DNA, 201 bp, Homo sapiens; identical to SEQ ID NO: 1762

SEQ ID NO: 1822 - DNA, 201 bp, Homo sapiens; identical to SEQ ID NO: 1763

SEQ ID NO: 1823 - DNA, 201 bp, Homo sapiens; identical to SEQ ID NO: 1761

SEQ ID NO: 1824 - DNA, 201 bp, Homo sapiens; identical to SEQ ID NO: 1756

SEQ ID NO: 1825 - DNA, 201 bp, Homo sapiens; identical to SEQ ID NO: 1749

SEQ ID NO: 1826 - DNA, 201 bp, Homo sapiens; identical to SEQ ID NO: 1750

SEQ ID NO: 1827 - DNA, 201 bp, Homo sapiens
tcacatccccagggaagatgtagactatcacctgtacccacacggtccgggactcaatccaaatgcctctacaggacaagaagctctctctcagacaaccrtctcatgggccccattccaggacacttctgagtacatcatttcatgtcatcctgttggcactgatgaagaacccttacagttcagggttcctggaacttc

SEQ ID NO: 1828 - DNA, 201 bp, Homo sapiens; identical to SEQ ID NO: 1753

SEQ ID NO: 1829 - DNA, 201 bp, Homo sapiens; identical to SEQ ID NO: 1755

SEQ ID NO: 1830 - DNA, 201 bp, Homo sapiens
cataggccaagaccatacccgccgaatgtaggtgaggaaatccaaattggtcacatccccagggaagatgtagactatcacctgtacccacacggtccggkactcaatccaaatgcctctacaggacaagaagctctctctcagacaaccatctcatgggccccattccaggacacttctgagtacatcatttcatgtcat

SEQ ID NO: 1831 - DNA, 201 bp, Homo sapiens; identical to SEQ ID NO: 1759

SEQ ID NO: 1832 - DNA, 201 bp, Homo sapiens; identical to SEQ ID NO: 1752

SEQ ID NO: 1833 - DNA, 201 bp, Homo sapiens; identical to SEQ ID NO: 1754

SEQ ID NO: 1834 - DNA, 201 bp, Homo sapiens; identical to SEQ ID NO: 1756

SEQ ID NO: 1835 - DNA, 201 bp, Homo sapiens; identical to SEQ ID NO: 1757

SEQ ID NO: 1836 - DNA, 201 bp, Homo sapiens; identical to SEQ ID NO: 1776

SEQ ID NO: 1837 - DNA, 201 bp, Homo sapiens; identical to SEQ ID NO: 1758

SEQ ID NO: 1838 - DNA, 201 bp, Homo sapiens; identical to SEQ ID NO: 1760

SEQ ID NO: 1839 - DNA, 201 bp, Homo sapiens; identical to SEQ ID NO: 1761

SEQ ID NO: 1840 - DNA, 201 bp, Homo sapiens; identical to SEQ ID NO: 1762

SEQ ID NO: 1841 - DNA, 201 bp, Homo sapiens; identical to SEQ ID NO: 1763

SEQ ID NO: 1842 - DNA, 201 bp, Homo sapiens; identical to SEQ ID NO: 1749

SEQ ID NO: 1843 - DNA, 201 bp, Homo sapiens; identical to SEQ ID NO: 1752

SEQ ID NO: 1844 - DNA, 201 bp, Homo sapiens; identical to SEQ ID NO: 1753

SEQ ID NO: 1845 - DNA, 201 bp, Homo sapiens; identical to SEQ ID NO: 1754

SEQ ID NO: 1846 - DNA, 201 bp, Homo sapiens; identical to SEQ ID NO: 1755

SEQ ID NO: 1847 - DNA, 201 bp, Homo sapiens; identical to SEQ ID NO: 1756

SEQ ID NO: 1848 - DNA, 201 bp, Homo sapiens
gtgtttacactgtcaaggatgacaaggaaagtgtccctatctctgataccatcatcccagaggtgccccaactcactgacctaagctttgttgatataacygattcaagcatcggcctgaggtggaccccgctaaactcttccaccattattgggtaccgcatcacagtagttgcggcaggagaaggtatccctatttttg

SEQ ID NO: 1849 - DNA, 201 bp, Homo sapiens; identical to SEQ ID NO: 1776

SEQ ID NO: 1850 - DNA, 201 bp, Homo sapiens; identical to SEQ ID NO: 1757

SEQ ID NO: 1851 - DNA, 201 bp, Homo sapiens; identical to SEQ ID NO: 1758

SEQ ID NO: 1852 - DNA, 201 bp, Homo sapiens; identical to SEQ ID NO: 1759

SEQ ID NO: 1853 - DNA, 201 bp, Homo sapiens; identical to SEQ ID NO: 1760

SEQ ID NO: 1854 - DNA, 201 bp, Homo sapiens; identical to SEQ ID NO: 1761

SEQ ID NO: 1855 - DNA, 201 bp, Homo sapiens; identical to SEQ ID NO: 1762

SEQ ID NO: 1856 - DNA, 201 bp, Homo sapiens
cggcctggagtacaatgtcagtgtttacactgtcaaggatgacaaggaaagtgtccctatctctgataccatcatcccagaggtgccccaactcactgacytaagctttgttgatataaccgattcaagcatcggcctgaggtggaccccgctaaactcttccaccattattgggtaccgcatcacagtagttgcggcagg

SEQ ID NO: 1857 - DNA, 201 bp, Homo sapiens; identical to SEQ ID NO: 1749

SEQ ID NO: 1858 - DNA, 201 bp, Homo sapiens
tcatcctgttggcactgatgaagaacccttacagttcagggttcctggaacttctaccagtgccactctgacaggcctcaccagaggtgccacctacaacrtcatagtggaggcactgaaagaccagcagaggcataaggttcgggaagaggttgttaccgtgggcaactctggatggtgccatgacaatggtgtgaacta

SEQ ID NO: 1859 - DNA, 201 bp, Homo sapiens; identical to SEQ ID NO: 1768

SEQ ID NO: 1860 - DNA, 201 bp, Homo sapiens; identical to SEQ ID NO: 1753

SEQ ID NO: 1861 - DNA, 201 bp, Homo sapiens; identical to SEQ ID NO: 1755

SEQ ID NO: 1862 - DNA, 201 bp, Homo sapiens; identical to SEQ ID NO: 1759

SEQ ID NO: 1863 - DNA, 201 bp, Homo sapiens; identical to SEQ ID NO: 1752

SEQ ID NO: 1864 - DNA, 201 bp, Homo sapiens; identical to SEQ ID NO: 1773

SEQ ID NO: 1865 - DNA, 201 bp, Homo sapiens; identical to SEQ ID NO: 1756

SEQ ID NO: 1866 - DNA, 201 bp, Homo sapiens; identical to SEQ ID NO: 1775

SEQ ID NO: 1867 - DNA, 201 bp, Homo sapiens; identical to SEQ ID NO: 1776

SEQ ID NO: 1868 - DNA, 201 bp, Homo sapiens; identical to SEQ ID NO: 1758

SEQ ID NO: 1869 - DNA, 201 bp, Homo sapiens; identical to SEQ ID NO: 1760

SEQ ID NO: 1870 - DNA, 201 bp, Homo sapiens; identical to SEQ ID NO: 1761

SEQ ID NO: 1871 - DNA, 201 bp, Homo sapiens; identical to SEQ ID NO: 1762

SEQ ID NO: 1872 - DNA, 201 bp, Homo sapiens
cctggaacttctaccagtgccactctgacaggcctcaccagaggtgccacctacaacatcatagtggaggcactgaaagaccagcagaggcataaggttcrggaagaggttgttaccgtgggcaactctggatggtgccatgacaatggtgtgaactacaagattggagagaagtgggaccgtcagggagaaaatggccag

SEQ ID NO: 1873 - DNA, 201 bp, Homo sapiens; identical to SEQ ID NO: 1749

SEQ ID NO: 1874 - DNA, 201 bp, Homo sapiens; identical to SEQ ID NO: 1750

SEQ ID NO: 1875 - DNA, 201 bp, Homo sapiens; identical to SEQ ID NO: 1827

SEQ ID NO: 1876 - DNA, 201 bp, Homo sapiens; identical to SEQ ID NO: 1753

SEQ ID NO: 1877 - DNA, 201 bp, Homo sapiens; identical to SEQ ID NO: 1755

SEQ ID NO: 1878 - DNA, 201 bp, Homo sapiens; identical to SEQ ID NO: 1830

SEQ ID NO: 1879 - DNA, 201 bp, Homo sapiens; identical to SEQ ID NO: 1759

SEQ ID NO: 1880 - DNA, 201 bp, Homo sapiens; identical to SEQ ID NO: 1752

SEQ ID NO: 1881 - DNA, 201 bp, Homo sapiens; identical to SEQ ID NO: 1754

SEQ ID NO: 1882 - DNA, 201 bp, Homo sapiens; identical to SEQ ID NO: 1756

SEQ ID NO: 1883 - DNA, 201 bp, Homo sapiens; identical to SEQ ID NO: 1757

SEQ ID NO: 1884 - DNA, 201 bp, Homo sapiens; identical to SEQ ID NO: 1758

SEQ ID NO: 1885 - DNA, 201 bp, Homo sapiens; identical to SEQ ID NO: 1760

SEQ ID NO: 1886 - DNA, 201 bp, Homo sapiens; identical to SEQ ID NO: 1761

SEQ ID NO: 1887 - DNA, 201 bp, Homo sapiens; identical to SEQ ID NO: 1762

SEQ ID NO: 1888 - DNA, 201 bp, Homo sapiens; identical to SEQ ID NO: 1763

SEQ ID NO: 1889 - DNA, 201 bp, Homo sapiens; identical to SEQ ID NO: 1758

SEQ ID NO: 1890 - DNA, 201 bp, Homo sapiens; identical to SEQ ID NO: 1750

SEQ ID NO: 1891 - DNA, 201 bp, Homo sapiens; identical to SEQ ID NO: 1751

SEQ ID NO: 1892 - DNA, 201 bp, Homo sapiens; identical to SEQ ID NO: 1752

SEQ ID NO: 1893 - DNA, 201 bp, Homo sapiens; identical to SEQ ID NO: 1760

SEQ ID NO: 1894 - DNA, 201 bp, Homo sapiens; identical to SEQ ID NO: 1763

SEQ ID NO: 1895 - DNA, 201 bp, Homo sapiens; identical to SEQ ID NO: 1755

SEQ ID NO: 1896 - DNA, 201 bp, Homo sapiens; identical to SEQ ID NO: 1749

SEQ ID NO: 1897 - DNA, 201 bp, Homo sapiens; identical to SEQ ID NO: 1752

SEQ ID NO: 1898 - DNA, 201 bp, Homo sapiens; identical to SEQ ID NO: 1753

SEQ ID NO: 1899 - DNA, 201 bp, Homo sapiens; identical to SEQ ID NO: 1754

SEQ ID NO: 1900 - DNA, 201 bp, Homo sapiens; identical to SEQ ID NO: 1755

SEQ ID NO: 1901 - DNA, 201 bp, Homo sapiens; identical to SEQ ID NO: 1756

SEQ ID NO: 1902 - DNA, 201 bp, Homo sapiens; identical to SEQ ID NO: 1757

SEQ ID NO: 1903 - DNA, 201 bp, Homo sapiens; identical to SEQ ID NO: 1776

SEQ ID NO: 1904 - DNA, 201 bp, Homo sapiens; identical to SEQ ID NO: 1758

SEQ ID NO: 1905 - DNA, 201 bp, Homo sapiens; identical to SEQ ID NO: 1760

SEQ ID NO: 1906 - DNA, 201 bp, Homo sapiens; identical to SEQ ID NO: 1759

SEQ ID NO: 1907 - DNA, 201 bp, Homo sapiens; identical to SEQ ID NO: 1761

SEQ ID NO: 1908 - DNA, 201 bp, Homo sapiens; identical to SEQ ID NO: 1762

SEQ ID NO: 1909 - DNA, 201 bp, Homo sapiens; identical to SEQ ID NO: 1749

SEQ ID NO: 1910 - DNA, 201 bp, Homo sapiens; identical to SEQ ID NO: 1750

SEQ ID NO: 1911 - DNA, 201 bp, Homo sapiens; identical to SEQ ID NO: 1751

SEQ ID NO: 1912 - DNA, 201 bp, Homo sapiens; identical to SEQ ID NO: 1753

SEQ ID NO: 1913 - DNA, 201 bp, Homo sapiens; identical to SEQ ID NO: 1755

SEQ ID NO: 1914 - DNA, 201 bp, Homo sapiens; identical to SEQ ID NO: 1759

SEQ ID NO: 1915 - DNA, 201 bp, Homo sapiens; identical to SEQ ID NO: 1752

SEQ ID NO: 1916 - DNA, 201 bp, Homo sapiens; identical to SEQ ID NO: 1754

SEQ ID NO: 1917 - DNA, 201 bp, Homo sapiens; identical to SEQ ID NO: 1756

SEQ ID NO: 1918 - DNA, 201 bp, Homo sapiens; identical to SEQ ID NO: 1757

SEQ ID NO: 1919 - DNA, 201 bp, Homo sapiens; identical to SEQ ID NO: 1776

SEQ ID NO: 1920 - DNA, 201 bp, Homo sapiens; identical to SEQ ID NO: 1758

SEQ ID NO: 1921 - DNA, 201 bp, Homo sapiens; identical to SEQ ID NO: 1760

SEQ ID NO: 1922 - DNA, 201 bp, Homo sapiens; identical to SEQ ID NO: 1761

SEQ ID NO: 1923 - DNA, 201 bp, Homo sapiens; identical to SEQ ID NO: 1762

SEQ ID NO: 1924 - DNA, 201 bp, Homo sapiens; identical to SEQ ID NO: 1763

SEQ ID NO: 1925 - DNA, 201 bp, Homo sapiens
ctcagtccacgttgatttctcctcatctgaatcacaaaggagcaggcatggaagtgttctgagcagcaattttacttaccacacgagtgatggagatgcaytgctccttctctgaagggaatcccaaagccttgtgtctacagagaacctggagttcctgaacctgatgctgactagtgaggaaagatttttgttgttatt

SEQ ID NO: 1926 - DNA, 201 bp, Homo sapiens
ttttggaagcatattcttcatcaccgtcatcagcattgataggtacctggccatcgtcctggccgccaactccatgaacaaccggaccgtgcagcatggcrtcaccatcagcctaggcgtctgggcagcagccattttggtggcagcaccccagttcatgttcacaaagcagaaagaaaatgaatgccttggtgactaccc

SEQ ID NO: 1927 - DNA, 201 bp, Homo sapiens
tacaacgttatgattttcctggagacgcttaagctctatgacttctttcccagttgtgacatgaggaaggatctgaggctggccctcagtgtgactgagayggttgcatttagccattgttgcctgaatcctctcatctatgcatttgctggggagaagttcagaagatacctttaccacctgtatgggaaatgcctggct

SEQ ID NO: 1928 - DNA, 201 bp, Homo sapiens
aagcagaaatacatatttccaagaagttggatgggtgggtactattctgattacacaaaacaaatgccacacatcacccttaccatgtgcctgatccagcytctcccctgattacaccagcctcgtcttcattaagccctcttccatcatgtccccaaacctgcaagggctccccactgcctactgcatcgagtcaaaact

SEQ ID NO: 1929 - DNA, 201 bp, Homo sapiens
ccagacgctgttttcctgcaagaaccacaagaaagccaaagccattaaactgatccttctggtggtcatcgtgtttttcctcttctggacaccctacaacrttatgattttcctggagacgcttaagctctatgacttctttcccagttgtgacatgaggaaggatctgaggctggccctcagtgtgactgagacggttgc

SEQ ID NO: 1930 - DNA, 201 bp, Homo sapiens
ctgatgctgactagtgaggaaagatttttgttgttatttcttacaggcacaaaatgatggacccaatgcacacaaaacaaccctagagtgttgttgagaaytgtgctcaaaatttgaagaatgaacaaattgaactctttgaatgacaaagagtagacatttctcttactgcaaatgtcatcagaactttttggtttgcag

SEQ ID NO: 1931 - DNA, 201 bp, Homo sapiens
tctggcccgtgctccgcaatgtggaaacaaattttcttggcttcctactccccctgctcattatgagttattgctacttcagaatcatccagacgctgttytcctgcaagaaccacaagaaagccaaagccattaaactgatccttctggtggtcatcgtgtttttcctcttctggacaccctacaacgttatgattttcc

SEQ ID NO: 1932 - DNA, 201 bp, Homo sapiens
atcagaactttttggtttgcagatgacaaaaattcaactcagactagtttagttaaatgagggtggtgaatattgttcatattgtggcacaagcaaaaggrtgtctgagccctcaaagtgaggggaaaccagggcctgagccaagctagaattccctctctctgactctcaaatcttttagtcattatagatcccccagac

SEQ ID NO: 1933 - DNA, 201 bp, Homo sapiens
cgaggtcctccaggaaatctggcccgtgctccgcaatgtggaaacaaattttcttggcttcctactccccctgctcattatgagttattgctacttcagartcatccagacgctgttttcctgcaagaaccacaagaaagccaaagccattaaactgatccttctggtggtcatcgtgtttttcctcttctggacacccta

SEQ ID NO: 1934 - DNA, 201 bp, Homo sapiens; identical to SEQ ID NO: 1925

SEQ ID NO: 1935 - DNA, 201 bp, Homo sapiens; identical to SEQ ID NO: 1926

SEQ ID NO: 1936 - DNA, 201 bp, Homo sapiens; identical to SEQ ID NO: 1927

SEQ ID NO: 1937 - DNA, 201 bp, Homo sapiens; identical to SEQ ID NO: 1928

SEQ ID NO: 1938 - DNA, 201 bp, Homo sapiens; identical to SEQ ID NO: 1929

SEQ ID NO: 1939 - DNA, 201 bp, Homo sapiens; identical to SEQ ID NO: 1930

SEQ ID NO: 1940 - DNA, 201 bp, Homo sapiens; identical to SEQ ID NO: 1931

SEQ ID NO: 1941 - DNA, 201 bp, Homo sapiens; identical to SEQ ID NO: 1932

SEQ ID NO: 1942 - DNA, 201 bp, Homo sapiens; identical to SEQ ID NO: 1933

SEQ ID NO: 1943 - DNA, 201 bp, Homo sapiens
gagctggaaagtcatccctcacaaactgcctcttcagaatcttagaggctgccggtggtcagattatcattgatggagtagatattgcttccattgggctycacgacctccgagagaagctgaccatcatcccccaggaccccatcctgttctctggaagcctgaggatgaatctcgaccctttcaacaactactcagatg

SEQ ID NO: 1944 - DNA, 201 bp, Homo sapiens
tcagtctttctgccttcagtgttatttccaactgtgcttcaagctgggtgtaaaagtacggacagctatcatggcttctgtatataagaaggcattgaccytatccaacttggccaggaaggagtacaccgttggagaaacagtgaacctgatgtctgtggatgcccagaagctcatggatgtgaccaacttcatgcacat

SEQ ID NO: 1945 - DNA, 201 bp, Homo sapiens
gagttcgcccactgcacagtgatcaccatcgcccacaggctgcacaccatcatggacagtgacaaggtaatggtcctagacaacgggaagattatagagtrcggcagccctgaagaactgctacaaatccctggacccttttactttatggctaaggaagctggcattgagaatgtgaacagcacaaaattctagcagaag

SEQ ID NO: 1946 - DNA, 201 bp, Homo sapiens
gaagacatttctaagacatacaggccctgaagaggaagccacagtccatgatggcagtgaagaagaagacgatgactatgggctgatatccagtgtggaasagatccccgaagatgcagcctccataaccatgagaagagagaacagctttcgtcgaacacttagccgcagttctaggtccaatggcaggcatctgaagtc

SEQ ID NO: 1947 - DNA, 201 bp, Homo sapiens
ctgggagaaatggaaaatgtccacgggcacatcaccatcaagggcaccactgcctatgtcccacagcagtcctggattcagaatggcaccataaaggacarcatcctttttggaacagagtttaatgaaaagaggtaccagcaagtactggaggcctgtgctctcctcccagacttggaaatgctgcctggaggagatttg

SEQ ID NO: 1948 - DNA, 201 bp, Homo sapiens
ggaatgtgaatagcctgaaggaagacgaagaactagtgaaaggacaaaaactaattaagaaggaattcatagaaactggaaaggtgaagttctccatctamctggagtacctacaagcaataggattgttttcgatattcttcatcatccttgcgtttgtgatgaattctgtggcttttattggatccaacctctggctca

SEQ ID NO: 1949 - DNA, 201 bp, Homo sapiens
actgtgcttcaagctgggtgtaaaagtacggacagctatcatggcttctgtatataagaaggcattgaccctatccaacttggccaggaaggagtacaccrttggagaaacagtgaacctgatgtctgtggatgcccagaagctcatggatgtgaccaacttcatgcacatgctgtggtcaagtgttctacagattgtctt

SEQ ID NO: 1950 - DNA, 201 bp, Homo sapiens
accaggtccccaatctactctcacttcagcgagaccgtatcaggtttgccagttatccgtgcctttgagcaccagcagcgatttctgaaacacaatgaggwgaggattgacaccaaccagaaatgtgtcttttcctggatcacctccaacaggtggcttgcaattcgcctggagctggttgggaacctgactgtcttcttt

SEQ ID NO: 1951 - DNA, 201 bp, Homo sapiens
aggcagacctgccactttgttttgagcaaactgttctggtgtggattcccttgggcttcctatggctcctggccccctggcagcttctccacgtgtataartccaggaccaagagatcctctaccaccaaactctatcttgctaagcaggtattcgttggttttcttcttattctagcagccatagagctggcccttgtac

SEQ ID NO: 1952 - DNA, 201 bp, Homo sapiens
aaaagtggaaaatgaggcaccctgggtgactgataagaggcctccgccagattggcccagcaaaggcaagatccagtttaacaactaccaagtgcggtacygacctgagctggatctggtcctcagagggatcacttgtgacattggtagcatggagaagattggtgtggtgggcaggacaggagctggaaagtcatccct

SEQ ID NO: 1953 - DNA, 201 bp, Homo sapiens
cccaggaccccatcctgttctctggaagcctgaggatgaatctcgaccctttcaacaactactcagatgaggagatttggaaggccttggagctggctcayctcaagtcttttgtggccagcctgcaacttgggttatcccacgaagtgacagaggctggtggcaacctgagcataggccagaggcagctgctgtgcctgg

SEQ ID NO: 1954 - DNA, 201 bp, Homo sapiens
atgacatcagaaatagagaccaacattgtggctgttgagcgaataactgagtacacaaaagtggaaaatgaggcaccctgggtgactgataagaggcctcygccagattggcccagcaaaggcaagatccagtttaacaactaccaagtgcggtaccgacctgagctggatctggtcctcagagggatcacttgtgacatt

SEQ ID NO: 1955 - DNA, 201 bp, Homo sapiens
ctgaggcgtctggactctgtcaccaggtccccaatctactctcacttcagcgagaccgtatcaggtttgccagttatccgtgcctttgagcaccagcagckatttctgaaacacaatgaggtgaggattgacaccaaccagaaatgtgtcttttcctggatcacctccaacaggtggcttgcaattcgcctggagctggtt

SEQ ID NO: 1956 - DNA, 201 bp, Homo sapiens
tgagcataggccagaggcagctgctgtgcctgggcagggctctgcttcggaaatccaagatcctggtcctggatgaggccactgctgcggtggatctagaracagacaacctcattcagacgaccatccaaaacgagttcgcccactgcacagtgatcaccatcgcccacaggctgcacaccatcatggacagtgacaagg

SEQ ID NO: 1957 - DNA, 201 bp, Homo sapiens
gggaccaaaaaagatgttccaaaatcctggttgatgaaggctctgttcaaaactttctacatggtgctcctgaaatcattcctactgaagctagtgaatgrcatcttcacgtttgtgagtcctcagctgctgaaattgctgatctcctttgcaagtgaccgtgacacatatttgtggattggatatctctgtgcaatcctc

SEQ ID NO: 1958 - DNA, 201 bp, Homo sapiens
agacgaccatccaaaacgagttcgcccactgcacagtgatcaccatcgcccacaggctgcacaccatcatggacagtgacaaggtaatggtcctagacaaygggaagattatagagtgcggcagccctgaagaactgctacaaatccctggacccttttactttatggctaaggaagctggcattgagaatgtgaacagca

SEQ ID NO: 1959 - DNA, 201 bp, Homo sapiens
ctttcaacaactactcagatgaggagatttggaaggccttggagctggctcacctcaagtcttttgtggccagcctgcaacttgggttatcccacgaagtkacagaggctggtggcaacctgagcataggccagaggcagctgctgtgcctgggcagggctctgcttcggaaatccaagatcctggtcctggatgaggcca

SEQ ID NO: 1960 - DNA, 201 bp, Homo sapiens
agcccaaggtatatttgtgttcatagcacatttctggagtgcctttggtttcgtccatgcatcaaatatcttgcacaagcaactgctgaacaatatccttygagcacctatgagattttttgacacaacacccacaggccggattgtgaacaggtttgccggcgatatttccacagtggatgacaccctgcctcagtcctt

SEQ ID NO: 1961 - DNA, 201 bp, Homo sapiens
cgccagattggcccagcaaaggcaagatccagtttaacaactaccaagtgcggtaccgacctgagctggatctggtcctcagagggatcacttgtgacatyggtagcatggagaagattggtgtggtgggcaggacaggagctggaaagtcatccctcacaaactgcctcttcagaatcttagaggctgccggtggtcaga

SEQ ID NO: 1962 - DNA, 201 bp, Homo sapiens
ccactgctgcggtggatctagagacagacaacctcattcagacgaccatccaaaacgagttcgcccactgcacagtgatcaccatcgcccacaggctgcayaccatcatggacagtgacaaggtaatggtcctagacaacgggaagattatagagtgcggcagccctgaagaactgctacaaatccctggacccttttact

SEQ ID NO: 1963 - DNA, 190 bp, Homo sapiens
acatcagaatggtagataattcctgttccactttctttgatgaaacaagtaaagaagaaacaacacaatcatattaatagaagagtcttygttccagacgcagtccaggaatcatgctggagaagttctgcaactctactttttggaattcctcattcctggacagtccggaggcagacctgccactttg

SEQ ID NO: 1964 - DNA, 201 bp, Homo sapiens
tgcaactctactttttggaattcctcattcctggacagtccggaggcagacctgccactttgttttgagcaaactgttctggtgtggattcccttgggctwcctatggctcctggccccctggcagcttctccacgtgtataaatccaggaccaagagatcctctaccaccaaactctatcttgctaagcaggtattcgtt

SEQ ID NO: 1965 - DNA, 201 bp, Homo sapiens
tagtgaaaggacaaaaactaattaagaaggaattcatagaaactggaaaggtgaagttctccatctacctggagtacctacaagcaataggattgttttcratattcttcatcatccttgcgtttgtgatgaattctgtggcttttattggatccaacctctggctcagtgcttggaccagtgactctaaaatcttcaata

SEQ ID NO: 1966 - DNA, 201 bp, Homo sapiens
ttctacagattgtcttatctatcttcttcctatggagagagttgggaccctcagtcttagcaggtgttggggtgatggtgcttgtaatcccaattaatgcdatactgtccaccaagagtaagaccattcaggtcaaaaatatgaagaataaagacaaacgtttaaagatcatgaatgagattcttagtggaatcaagatcc

SEQ ID NO: 1967 - DNA, 201 bp, Homo sapiens
atggtgctcctgaaatcattcctactgaagctagtgaatgacatcttcacgtttgtgagtcctcagctgctgaaattgctgatctcctttgcaagtgaccrtgacacatatttgtggattggatatctctgtgcaatcctcttattcactgcggctctcattcagtctttctgccttcagtgttatttccaactgtgcttc

SEQ ID NO: 1968 - DNA, 201 bp, Homo sapiens
agagagctgcagaaagccaggcgggcactccagagacggcaggagaagagctcccagcagaactctggagccaggctgcctggcttgaacaagaatcagartcaaagccaagatgcccttgtcctggaagatgttgaaaagaaaaaaaagaagtctgggaccaaaaaagatgttccaaaatcctggttgatgaaggctctg

SEQ ID NO: 1969 - DNA, 201 bp, Homo sapiens
gttttatgtgtctacctcccgccagctgaggcgtctggactctgtcaccaggtccccaatctactctcacttcagcgagaccgtatcaggtttgccagttwtccgtgcctttgagcaccagcagcgatttctgaaacacaatgaggtgaggattgacaccaaccagaaatgtgtcttttcctggatcacctccaacaggtg

SEQ ID NO: 1970 - DNA, 201 bp, Homo sapiens; identical to SEQ ID NO: 1943

SEQ ID NO: 1971 - DNA, 201 bp, Homo sapiens; identical to SEQ ID NO: 1944

SEQ ID NO: 1972 - DNA, 201 bp, Homo sapiens; identical to SEQ ID NO: 1945

SEQ ID NO: 1973 - DNA, 201 bp, Homo sapiens; identical to SEQ ID NO: 1946

SEQ ID NO: 1974 - DNA, 201 bp, Homo sapiens; identical to SEQ ID NO: 1947

SEQ ID NO: 1975 - DNA, 201 bp, Homo sapiens; identical to SEQ ID NO: 1948

SEQ ID NO: 1976 - DNA, 201 bp, Homo sapiens; identical to SEQ ID NO: 1949

SEQ ID NO: 1977 - DNA, 201 bp, Homo sapiens; identical to SEQ ID NO: 1950

SEQ ID NO: 1978 - DNA, 201 bp, Homo sapiens; identical to SEQ ID NO: 1951

SEQ ID NO: 1979 - DNA, 201 bp, Homo sapiens; identical to SEQ ID NO: 1952

SEQ ID NO: 1980 - DNA, 201 bp, Homo sapiens; identical to SEQ ID NO: 1953

SEQ ID NO: 1981 - DNA, 201 bp, Homo sapiens; identical to SEQ ID NO: 1954

SEQ ID NO: 1982 - DNA, 201 bp, Homo sapiens; identical to SEQ ID NO: 1955

SEQ ID NO: 1983 - DNA, 201 bp, Homo sapiens; identical to SEQ ID NO: 1956

SEQ ID NO: 1984 - DNA, 201 bp, Homo sapiens; identical to SEQ ID NO: 1957

SEQ ID NO: 1985 - DNA, 201 bp, Homo sapiens; identical to SEQ ID NO: 1958

SEQ ID NO: 1986 - DNA, 201 bp, Homo sapiens; identical to SEQ ID NO: 1959

SEQ ID NO: 1987 - DNA, 201 bp, Homo sapiens; identical to SEQ ID NO: 1960

SEQ ID NO: 1988 - DNA, 201 bp, Homo sapiens; identical to SEQ ID NO: 1961

SEQ ID NO: 1989 - DNA, 201 bp, Homo sapiens; identical to SEQ ID NO: 1962

SEQ ID NO: 1990 - DNA, 190 bp, Homo sapiens; identical to SEQ ID NO: 1963

SEQ ID NO: 1991 - DNA, 201 bp, Homo sapiens; identical to SEQ ID NO: 1964

SEQ ID NO: 1992 - DNA, 201 bp, Homo sapiens; identical to SEQ ID NO: 1965

SEQ ID NO: 1993 - DNA, 201 bp, Homo sapiens; identical to SEQ ID NO: 1966

SEQ ID NO: 1994 - DNA, 201 bp, Homo sapiens; identical to SEQ ID NO: 1967

SEQ ID NO: 1995 - DNA, 201 bp, Homo sapiens; identical to SEQ ID NO: 1968

SEQ ID NO: 1996 - DNA, 201 bp, Homo sapiens; identical to SEQ ID NO: 1969

SEQ ID NO: 1997 - DNA, 201 bp, Homo sapiens
aatccaacctggcttggtctggcacggagcccacctgtgcagccatgaacgtcaatgtgggtgtcagaacggcagctgcacttctggatcagttttatgaraaaaggagactcctcattgtgtccacacccacagcccgaaacctcctttaccggctccagctaggaatgctgcagcaagcacagtgtggccttgatcttc

SEQ ID NO: 1998 - DNA, 201 bp, Homo sapiens
tgcagaacccaacaaactgacagtccgggtgtcctgggagacacccgaaggaagagacacagcagatggaattcttactgatgtcattctaaaaggcctcyccccaggctccaactttccagaaggagaccacaagatccagtacacagtctatgacagagctgagaataagggcacttgcaaatttcgagttaaagtaag

SEQ ID NO: 1999 - DNA, 201 bp, Homo sapiens
gtgggtgtgttcccgactctcattggcaggataggagcaaagattatgcctccagccctagcgctgcagctcaggctgttgctgcgaatcccactctactycttcagtatggtgctagtggataagcatggcatggacaaagagcgctatgtctccctggtgatgcctgtggccctgttcaacctgattgacacttttccc

SEQ ID NO: 2000 - DNA, 201 bp, Homo sapiens
cacttaaaaattagcatgctgctttttgtacttggaagtgtttcaaaaaattatatgaccatatttactctttctaactttctttactccatcatggctgsttgattttgtagagaaattagaacccataaccatacacaggctatcaacatgttattcaatgtgacacctaactcttttctattttgttttttaagtaag

SEQ ID NO: 2001 - DNA, 201 bp, Homo sapiens
accaggtgcgacattcgctgccagaagggctacgagctgcatggctcttccctactgatctgccagtcaaacaaacgatggtctgacaaggtcatctgcaracaaaagcgatgtcctacccttgccatgccagcaaatggagggtttaagtgtgtagatggtgcctactttaactcccggtgtgagtattattgttcacca

SEQ ID NO: 2002 - DNA, 201 bp, Homo sapiens; identical to SEQ ID NO: 1997

SEQ ID NO: 2003 - DNA, 201 bp, Homo sapiens; identical to SEQ ID NO: 1998

SEQ ID NO: 2004 - DNA, 201 bp, Homo sapiens; identical to SEQ ID NO: 1999

SEQ ID NO: 2005 - DNA, 201 bp, Homo sapiens; identical to SEQ ID NO: 2000

SEQ ID NO: 2006 - DNA, 201 bp, Homo sapiens; identical to SEQ ID NO: 2001

SEQ ID NO: 2007 - DNA, 201 bp, Homo sapiens
ggaaatgggccttattccgttggttgtacagacttaatgtttgatcacactaataagggcaccttcttgcgtttatattatccatcccaagataatgatcrccttgacaccctttggatcccaaataaagaatatttttggggtcttagcaaatttcttggaacacactggcttatgggcaacattttgaggttactcttt

SEQ ID NO: 2008 - DNA, 201 bp, Homo sapiens
ccgcggcgggctaagttaaccgcgggtccaggagactaagctgaaactgctgctcagctcccaagatggtgccacccaaattgcatgtgcttttctgcctstgcggctgcctggctgtggtttatccttttgactggcaatacataaatcctgttgcccatatgaaatcatcagcatgggtcaacaaaatacaagtactga

SEQ ID NO: 2009 - DNA, 201 bp, Homo sapiens
gacttcacttttgcaactggcaaaataattggacacatgctcaaattaaagggagacatagattcaaatgcagctattgatcttagcaacaaagcttcatyagcattcttacaaaagcatttaggacttcataaagattttgatcagtgggactgcttgattgaaggagatgatgagaatcttattccagggaccaacatt

SEQ ID NO: 2010 - DNA, 201 bp, Homo sapiens
tcttcaggaatagagaaatacaattaggattaaaataggttttttaaaagtcttgtttcaaaactgtctaaaattatgtgtgtgtgtgtgtgtgtgtgtgwgagagagagagagagagagagagagagagaattttaatgtattttcccaaaggactcatattttaaaatgtaggctatactgtaatcgtgattgaagctt

SEQ ID NO: 2011 - DNA, 201 bp, Homo sapiens
ttcaggaatagagaaatacaattaggattaaaataggttttttaaaagtcttgtttcaaaactgtctaaaattatgtgtgtgtgtgtgtgtgtgtgtgtgwgagagagagagagagagagagagagagaattttaatgtattttcccaaaggactcatattttaaaatgtaggctatactgtaatcgtgattgaagcttgg

SEQ ID NO: 2012 - DNA, 201 bp, Homo sapiens
aaggagctggtgagcacgacaccacccaggcattgcctggctctctccgcggcgggctaagttaaccgcgggtccaggagactaagctgaaactgctgctyagctcccaagatggtgccacccaaattgcatgtgcttttctgcctctgcggctgcctggctgtggtttatccttttgactggcaatacataaatcctgtt

SEQ ID NO: 2013 - DNA, 201 bp, Homo sapiens
atcaggggttcagtccaccagaattttgctgacttcacttttgcaactggcaaaataattggacacatgctcaaattaaagggagacatagattcaaatgyagctattgatcttagcaacaaagcttcattagcattcttacaaaagcatttaggacttcataaagattttgatcagtgggactgcttgattgaaggagat

SEQ ID NO: 2014 - DNA, 201 bp, Homo sapiens
attgacctggcatctcatgggtttatagttgctgctgtagaacacagagatagatctgcatctgcaacttactatttcaaggaccaatctgctgcagaaayaggggacaagtcttggctctaccttagaaccctgaaacaagaggaggagacacatatacgaaatgagcaggtacggcaaagagcaaaagaatgttcccaa

SEQ ID NO: 2015 - DNA, 201 bp, Homo sapiens; identical to SEQ ID NO: 2007

SEQ ID NO: 2016 - DNA, 201 bp, Homo sapiens
gttcccgcgagcagctccgcgccgcgcctgagagactaagctgaaactgctgctcagctcccaagatggtgccacccaaattgcatgtgcttttctgcctstgcggctgcctggctgtggtttatccttttgactggcaatacataaatcctgttgcccatatgaaatcatcagcatgggtcaacaaaatacaagtactga

SEQ ID NO: 2017 - DNA, 201 bp, Homo sapiens; identical to SEQ ID NO: 2009

SEQ ID NO: 2018 - DNA, 201 bp, Homo sapiens; identical to SEQ ID NO: 2010

SEQ ID NO: 2019 - DNA, 201 bp, Homo sapiens; identical to SEQ ID NO: 2011

SEQ ID NO: 2020 - DNA, 112 bp, Homo sapiens
cctcctccagcwtcaccaggggaggagagggtcggggccacaaggccgcgctaggcggacccaggacacagcccgcgcgcagcccacccgcccgccgcctgccagagctgct

SEQ ID NO: 2021 - DNA, 201 bp, Homo sapiens
cgcttgggtcgcgttggtgcgcggtggaacgcgcccagggaccccagttcccgcgagcagctccgcgccgcgcctgagagactaagctgaaactgctgctyagctcccaagatggtgccacccaaattgcatgtgcttttctgcctctgcggctgcctggctgtggtttatccttttgactggcaatacataaatcctgtt

SEQ ID NO: 2022 - DNA, 201 bp, Homo sapiens; identical to SEQ ID NO: 2013

SEQ ID NO: 2023 - DNA, 201 bp, Homo sapiens; identical to SEQ ID NO: 2014

SEQ ID NO: 2024 - DNA, 201 bp, Homo sapiens
taagtcttcttagatataatgctaacttaacaaaaatgaagaacactttgatctcagcatcacaacaactgaaagctaaattggagttttttcacaaaagyattcagcttgacttggagagatacagcgagcagatgacgtatgggatatcttcagaaaaaatgctaaaagcatggaaagaaatggaagaaaaggccatcc

SEQ ID NO: 2025 - DNA, 201 bp, Homo sapiens
aaattccactgaaaatttaacagtatccccttctcatcgaagggattgtgtatctgtgcttctaatattagttggctttcataaatcatgttgttgtgtgtatatgtatttaagatgtacatttaataatatcaaagagaagatgcctgttaatttataatgtatttgaaaattacatgttttttcatttgtaaaaatgag

SEQ ID NO: 2026 - DNA, 201 bp, Homo sapiens
taagaagaaggatccaaagtgtatatttgcatgtgaagagatgtcaggagaagttcggtttagtagccatttacctcaaccaaatagcctttgtagtttartagtagaacccatggaaaactggctacagttgatgttgaattgggaccctcagcagagaggaggacctgttgaccttactttgaagcagccaagatgttt

SEQ ID NO: 2027 - DNA, 201 bp, Homo sapiens
aattccactgaaaatttaacagtatccccttctcatcgaagggattgtgtatctgtgcttctaatattagttggctttcataaatcatgttgttgtgtgtatatgtatttaagatgtacatttaataatatcaaagagaagatgcctgttaatttataatgtatttgaaaattacatgttttttcatttgtaaaaatgagt

SEQ ID NO: 2028 - DNA, 201 bp, Homo sapiens
ctttgatctcagcatcacaacaactgaaagctaaattggagttttttcacaaaagcattcagcttgacttggagagatacagcgagcagatgacgtatggratatcttcagaaaaaatgctaaaagcatggaaagaaatggaagaaaaggccatccactatgctgaggttggtgtcattggatacctggaggatcagatta

SEQ ID NO: 2029 - DNA, 201 bp, Homo sapiens
aatactgttctggaggagatctccgaaagctgctcaacaaaccagaaaattgttgtggacttaaagaaagccagatactttctttactaagtgatataggrtctgggattcgatatttgcatgaaaacaaaattatacatcgagatctaaaacctgaaaacatagttcttcaggatgttggtggaaagataatacataaaa

SEQ ID NO: 2030 - DNA, 201 bp, Homo sapiens
tgcaatctaatctgaactgaccttgaatctttttatcccatttagtgtgaatattcctttattttgctgcttgatgatgagagggagggctgctgccacakactgtggtgagggctggttaatgtagtatggtatatgcacaaaactacttttctaaaatctaaaatttcataattctgaaacaacttgccccaagggttt

SEQ ID NO: 2031 - DNA, 201 bp, Homo sapiens
tcattttaaattccactgaaaatttaacagtatccccttctcatcgaagggattgtgtatctgtgcttctaatattagttggctttcataaatcatgttgktgtgtgtatatgtatttaagatgtacatttaataatatcaaagagaagatgcctgttaatttataatgtatttgaaaattacatgttttttcatttgtaa

SEQ ID NO: 2032 - DNA, 201 bp, Homo sapiens
gcaaaatacagcttccaattatacagctgcgtaaagtgtgggctgaagcagtgcactatgtgtctggactaaaagaagactatagcaggctctttcagggrcaaagggcagcaatgttaagtcttcttagatataatgctaacttaacaaaaatgaagaacactttgatctcagcatcacaacaactgaaagctaaattgg

SEQ ID NO: 2033 - DNA, 201 bp, Homo sapiens
catgtgaagagatgtcaggagaagttcggtttagtagccatttacctcaaccaaatagcctttgtagtttagtagtagaacccatggaaaactggctacasttgatgttgaattgggaccctcagcagagaggaggacctgttgaccttactttgaagcagccaagatgttttgtattaatggatcacattttgaatttga

SEQ ID NO: 2034 - DNA, 201 bp, Homo sapiens
tcctggcatcataaggagttggtgtaatcattttaaattccactgaaaatttaacagtatccccttctcatcgaagggattgtgtatctgtgcttctaatmttagttggctttcataaatcatgttgttgtgtgtatatgtatttaagatgtacatttaataatatcaaagagaagatgcctgttaatttataatgtattt

SEQ ID NO: 2035 - DNA, 201 bp, Homo sapiens
tgtggaggctggacacacggccaccttgcgctgctcagccacaggcagccccgcgcccaccatccactggtccaagctgcgttccccactgccctggcagyaccggctggaaggtgacacactcatcataccccgggtagcccagcaggactcgggccagtacatctgcaatgccactagccctgctgggcacgctgaggc

SEQ ID NO: 2036 - DNA, 201 bp, Homo sapiens
cggcccgatgggcagccggccacacgcgagcacctcctgatggcactggccgacctggatgagctcctgatccgggccacgttctcctccgtgccgctggyggccagcatcagcgcagtcagcctggaggtcgcccagccggggccctcaaacagaccccgcgccctcgaggtggaggagtgccgctgcccgccaggctac

SEQ ID NO: 2037 - DNA, 201 bp, Homo sapiens
acagccaggtgccagggcccataggctgcaactgtgacccccaaggcagcgtcagcagccagtgtgatgctgctggtcagtgccagtgcaaggcccaggtrgaaggcctcacttgcagccactgccggccccaccacttccacctgagtgccagcaacccagacggctgcctgccctgcttctgtatgggcatcacccagc

SEQ ID NO: 2038 - DNA, 201 bp, Homo sapiens
tgtgctccacgtgcatgggggcggtgggcccagagtccaagtgagcccagagaggacccaggtccacgcaggccgcaccgtcaggctgtactgcagggctkcaggcgtgcctagcgccaccatcacctggaggaaggaagggggcagcctcccaccacaggcccggtcagagcgcacagacatcgcgacactgctcatccc

SEQ ID NO: 2039 - DNA, 201 bp, Homo sapiens
cgctgcagcgccacagggagccccacgcccaccctcgagtggacagggggccccggcggccagctccctgcgaaggcacaaatccacggcggcatcctgcrcctgccagctgtcgagcccacggatcaggcccagtacttgtgccgagcccacagcagcgctgggcagcaggtggccagggctgtgctccacgtgcatggg

SEQ ID NO: 2040 - DNA, 201 bp, Homo sapiens
agagcccagcactgatagggccccgcccaccgggccccgcccaccccaggccacatccccacccatctggaagtgaaggcccagggactcctccaacagamaacggacggacggatgccgctggtgctcaggaagagctagtgccttaggtgggggaaggcaggactcacgactgagagagagaggagggggatatgacca

SEQ ID NO: 2041 - DNA, 201 bp, Homo sapiens
tcctgatccgagcatcctacgcccagcagcccgctgagagcagggtctctggcatcagcatggacgtggctgtgcccgaggaaaccggccaggaccccgcrctggaagtggaacagtgctcctgcccacccgggtaccgtgggccgtcctgccaggactgtgacacaggctacacacgcacgcccagtggcctctacctgg

SEQ ID NO: 2042 - DNA, 201 bp, Homo sapiens
gaccccatcaatgacggcgagtggcaccgggtgacagcactgcgggagggccgcagaggttccatccaagtcgacggtgaggagctggtcagcggccggtscccaggtcccaacgtggcagtcaacgccaagggcagcgtctacatcggcggagcccctgacgtggccacgctgaccgggggcagattctcctcaggcatc

SEQ ID NO: 2043 - DNA, 201 bp, Homo sapiens
actgcgggagggccgcagaggttccatccaagtcgacggtgaggagctggtcagcggccggtccccaggtcccaacgtggcagtcaacgccaagggcagcrtctacatcggcggagcccctgacgtggccacgctgaccgggggcagattctcctcaggcatcacaggctgtgtcaagaacctggtgctgcactcggcccg

SEQ ID NO: 2044 - DNA, 201 bp, Homo sapiens
actcccgggccacgccccagcccgacaatgtcgagtatattattattaatattattatgaatttttgtaagaaaccgaggcgatgccacgctttgctgctmccgccctgggctggactggaggtgggcatgccaccctcacacacacagctgggcaaagccacaaggctggccagcaaggcaggttggatgggagtgggca

SEQ ID NO: 2045 - DNA, 201 bp, Homo sapiens
tggacgtggagttcaagccactcgcccctgacggggtcctgctgttcagcggggggaagagcgggcctgtggaggacttcgtgtccctggcgatggtgggyggccacctggagttccgctatgagttggggtcagggctggccgttctgcggagcgccgagccgctggccctgggccgctggcaccgtgtgtctgcagagc

SEQ ID NO: 2046 - DNA, 201 bp, Homo sapiens
ggcagcgtctacatcggcggagcccctgacgtggccacgctgaccgggggcagattctcctcaggcatcacaggctgtgtcaagaacctggtgctgcactyggcccgacccggcgccccgcccccacagcccctggacctgcagcaccgcgcccaggccggggccaacacacgcccctgcccctcgtaggcacctgcctgc

SEQ ID NO: 2047 - DNA, 201 bp, Homo sapiens
tgaacccacagcgaaacagccgcctgacaggagaattcactgtggaacccgtgcccgagggtgcccagctctcttttggcaactttgcccaactcggccaygagtccttctactggcagctgccggagacataccagggagacaaggtggcggcctacggtgggaagttgcgatacaccctctcctacacagcaggcccac

SEQ ID NO: 2048 - DNA, 201 bp, Homo sapiens
tggcactggcaggcatcgacaccctcctgatccgagcatcctacgcccagcagcccgctgagagcagggtctctggcatcagcatggacgtggctgtgccygaggaaaccggccaggaccccgcgctggaagtggaacagtgctcctgcccacccgggtaccgtgggccgtcctgccaggactgtgacacaggctacacac

SEQ ID NO: 2049 - DNA, 201 bp, Homo sapiens
gccccacattctctctcctcgtggagacgacatctttaccgccccggccagagacaaccatcatgcgacagccaccagtcacccacgctcctcagcccctrcttcccggttccgtcaggcccctgccctgtgggccccaggaggccgcatgccgcaatgggcactgcatccccagagactacctctgcgacggacaggagg

SEQ ID NO: 2050 - DNA, 201 bp, Homo sapiens
cttcacagtcaccgtcccgcccagtgaggggtcttcctaccgccttaggagcccggtcatctccatcgacccgcccagcagcaccgtgcagcagggccagratgccagcttcaagtgcctcatccatgacggggcagcccccatcagcctcgagtggaagacccggaaccaggagctggaggacaacgtccacatcagtcc

SEQ ID NO: 2051 - DNA, 201 bp, Homo sapiens
tggccacgctgaccgggggcagattctcctcaggcatcacaggctgtgtcaagaacctggtgctgcactcggcccgacccggcgccccgcccccacagccyctggacctgcagcaccgcgcccaggccggggccaacacacgcccctgcccctcgtaggcacctgcctgccccacacggactcccgggccacgccccagcc

SEQ ID NO: 2052 - DNA, 201 bp, Homo sapiens
aactggcggagttccgctgcagcgccacagggagccccacgcccaccctcgagtggacagggggccccggcggccagctccctgcgaaggcacaaatccayggcggcatcctgcgcctgccagctgtcgagcccacggatcaggcccagtacttgtgccgagcccacagcagcgctgggcagcaggtggccagggctgtgc

SEQ ID NO: 2053 - DNA, 201 bp, Homo sapiens
gttgtcctttcagcctcagatgccagcccaccgccggtcaagattgagtcctcatcgccttctgtgacagaagggcaaacactcgacctcaactgtgtggkggcagggtcagcccatgcccaggtcacctggtacaggcgagggggtagcctgcctccccacacccaggtgcacggctcccgtctgcggctcccccaggtc

SEQ ID NO: 2054 - DNA, 201 bp, Homo sapiens
gccggtccccaggtcccaacgtggcagtcaacgccaagggcagcgtctacatcggcggagcccctgacgtggccacgctgaccgggggcagattctcctcrggcatcacaggctgtgtcaagaacctggtgctgcactcggcccgacccggcgccccgcccccacagcccctggacctgcagcaccgcgcccaggccgggg

SEQ ID NO: 2055 - DNA, 201 bp, Homo sapiens
agcgtggaggcagcttacccagccggcaccagatcgtgggctcccggctgcggatccctcaggtgactccggcagactcgggcgagtacgtgtgtcacgtmagtaacggtgcaggctcccgggagacctcgctcatcgtcaccatccagggcagcggttcctcccacgtgcccagcgtctccccaccgatcaggatcgagt

SEQ ID NO: 2056 - DNA, 201 bp, Homo sapiens
tcaccatcgtgggcacccggcccagcaaccacggtacctaccgctgcgtggcctccaatgcctacggtgtggcccagagtgtggtgaacctcagtgtgcaygggccccctacagtgtccgtgctccccgagggccccgtgtgggtgaaagtgggaaaggctgtcaccctggagtgtgtcagtgccggggagccccgctcct

SEQ ID NO: 2057 - DNA, 201 bp, Homo sapiens
gcactgcgggagggccgcagaggttccatccaagtcgacggtgaggagctggtcagcggccggtccccaggtcccaacgtggcagtcaacgccaagggcarcgtctacatcggcggagcccctgacgtggccacgctgaccgggggcagattctcctcaggcatcacaggctgtgtcaagaacctggtgctgcactcggcc

SEQ ID NO: 2058 - DNA, 201 bp, Homo sapiens
gctcgtttttcagcacccccacccacctccacccagcccctggcacctcctctggcagactccccctcctaccacgtcctcctggcctgcattcccacccsctcctgccagcacacagcctggggtccctccctcaggggctgtaagggaaggcccaccccaactcttaccaggagctgctacaggcagagcccagcactg

SEQ ID NO: 2059 - DNA, 201 bp, Homo sapiens
caggaagagctagtgccttaggtgggggaaggcaggactcacgactgagagagagaggagggggatatgaccaccctgccccatctgcaggagcctgaagrtccagctcaagtgccatcctgccagtggcccccagactgtggggttgggacgcctggcctctgtgtcctagaagggaccctcctgtggtctttgtcttga

SEQ ID NO: 2060 - DNA, 201 bp, Homo sapiens
gtggtgcccgggcaggcccatgcccaggtcacgtggtacaagcgcgggggcagcctccccgcccggcaccagacccatggctcccagctgcggctccaccwcgtctcccctgccgactcaggcgagtatgtgtgtcgtgcagccagcggcccaggccctgagcaagaagcctccttcacagtcaccgtcccgcccagtgag

SEQ ID NO: 2061 - DNA, 201 bp, Homo sapiens
cgggggcagcctccccgcccggcaccagacccatggctcccagctgcggctccacctcgtctcccctgccgactcaggcgagtatgtgtgtcgtgcagccrgcggcccaggccctgagcaagaagcctccttcacagtcaccgtcccgcccagtgaggggtcttcctaccgccttaggagcccggtcatctccatcgaccc

SEQ ID NO: 2062 - DNA, 201 bp, Homo sapiens
agagcagcagctacgtgtgcgtctgcccagctggcttcaccgggagccgctgtgagcactcgcaggccctgcactgccatccagaggcctgtgggcccgaygccacctgtgtgaaccggcctgacggtcgaggctacacctgccgctgccacctgggccgctcggggttgcggtgtgaggaaggtgtgacagtgaccaccc

SEQ ID NO: 2063 - DNA, 201 bp, Homo sapiens
ctgagagcagcagctacgtgtgcgtctgcccagctggcttcaccgggagccgctgtgagcactcgcaggccctgcactgccatccagaggcctgtgggccsgacgccacctgtgtgaaccggcctgacggtcgaggctacacctgccgctgccacctgggccgctcggggttgcggtgtgaggaaggtgtgacagtgacca

SEQ ID NO: 2064 - DNA, 201 bp, Homo sapiens
cagccgatgggatgctgctgtacaatgggcagaagcgagtcccagggagccccaccaacctggccaaccggcagcccgacttcatctccttcggcctcgtkgggggaaggcccgagttccggttcgatgcaggctcaggcatggccaccatccgccatcccacaccactggccctgggccatttccacaccgtgaccctgc

SEQ ID NO: 2065 - DNA, 201 bp, Homo sapiens
tggagttcgaatgcctggcactgggtgaccccaagcctcaggtgacatggagcaaagttggagggcacctgcggccaggcattgtgcagagcggaggtgtygtcaggatcgcccacgtagagctggctgatgcgggacagtatcgctgcactgccaccaacgcagctggcaccacacaatcccacgtcctgctgcttgtgc

SEQ ID NO: 2066 - DNA, 201 bp, Homo sapiens
gggtggtgccctacttcacgcagaccccctactccttcctaccgctgcccaccatcaaggatgcctacaggaagttcgagatcaagatcaccttccggccygactcagccgatgggatgctgctgtacaatgggcagaagcgagtcccagggagccccaccaacctggccaaccggcagcccgacttcatctccttcggcc

SEQ ID NO: 2067 - DNA, 201 bp, Homo sapiens
gctctctccctgccacctccatcccagcagggtccacgcccaccgtgcaggtcacgcctcagctagagaccaagagcattggggccagcgttgagttccaytgtgctgtgcccagcgaccggggtacccagctccgttggttcaaggaagggggtcagctgcctccgggtcacagcgtgcaggatggggtgctccgaatcc

SEQ ID NO: 2068 - DNA, 201 bp, Homo sapiens
aaggccctcccggctctctccctgccacctccatcccagcagggtccacgcccaccgtgcaggtcacgcctcagctagagaccaagagcattggggccagygttgagttccactgtgctgtgcccagcgaccggggtacccagctccgttggttcaaggaagggggtcagctgcctccgggtcacagcgtgcaggatgggg

SEQ ID NO: 2069 - DNA, 201 bp, Homo sapiens
aaattcccggagaccaggttgtcagtgtggtgttcatcaaggagctggatggctgggtttttgtggagctggatgtgggctcggaagggaatgcggatggkgctcagattcaggagatgctgctcagggtcatctccagcggctctgtggcctcctacgtcacctctccccagggattccagttccgacgcctgggcacag

SEQ ID NO: 2070 - DNA, 201 bp, Homo sapiens
tggtagacacgctggagtcggagtacttgaaaattcccggagaccaggttgtcagtgtggtgttcatcaaggagctggatggctgggtttttgtggagctsgatgtgggctcggaagggaatgcggatggggctcagattcaggagatgctgctcagggtcatctccagcggctctgtggcctcctacgtcacctctcccc

SEQ ID NO: 2071 - DNA, 201 bp, Homo sapiens
aagccacaaggctggccagcaaggcaggttggatgggagtgggcacctcagaaagtcaccaggacttggggtcaggaacagtggctgggtgggcccagaastgcccccactgtccccctacccaccgatggagcccccagatagagctgggtggcctgtttctgcagcccttgggcagttctcactcctaggagagccaac

SEQ ID NO: 2072 - DNA, 201 bp, Homo sapiens
tgaggaccccatcaatgacggcgagtggcaccgggtgacagcactgcgggagggccgcagaggttccatccaagtcgacggtgaggagctggtcagcggcmggtccccaggtcccaacgtggcagtcaacgccaagggcagcgtctacatcggcggagcccctgacgtggccacgctgaccgggggcagattctcctcagg

SEQ ID NO: 2073 - DNA, 201 bp, Homo sapiens
gcagcggcccgatgggcagccagccacacgggagcacctgctgatggcactggcaggcatcgacaccctcctgatccgagcatcctacgcccagcagcccrctgagagcagggtctctggcatcagcatggacgtggctgtgcccgaggaaaccggccaggaccccgcgctggaagtggaacagtgctcctgcccacccgg

SEQ ID NO: 2074 - DNA, 201 bp, Homo sapiens
tctggaccctacttctggagcctcccttcacgcttcctgggggacaaggtgacctcctatggaggagagctgcgcttcacagtgacccagaggtcccagcygggctccacacccctgcacgggcagccgttggtggtgctgcaaggtaacaacatcatcctagagcaccatgtggcccaggagcccagccccggccagccc

SEQ ID NO: 2075 - DNA, 201 bp, Homo sapiens
gtgcttctgcatgggtgtcagtcgccactgcaccagctcttcatggagccgtgcccagttgcatggggcctctgaggagcctggtcacttcagcctgaccmacgccgcaagcacccacaccaccaacgagggcatcttctcccccacgcccggggaactgggattctcctccttccacagactcttatctggaccctactt

SEQ ID NO: 2076 - DNA, 201 bp, Homo sapiens
ctcacttccgcggctgtgtgggcgaggtgtcagtgaatggcaaacggctggacctcacctacagtttcctaggcagccagggcatcgggcaatgctatgayagctccccatgtgagcgccagccttgccaacatggtgccacgtgcatgcccgctggcgagtatgagttccagtgcctgtgtcgagatggattcaaaggag

SEQ ID NO: 2077 - DNA, 201 bp, Homo sapiens
ccgccgactcgggcgagtacgtgtgccgagtgttgggcagctccgtgcctctagaggcctctgtcctggtcaccattgagcctgcgggctcagtgcctgcwcttggggtcacccccacggtccggatcgagtcatcgtcttcgcaagtggccgaggggcagaccctggacctgaactgcctcgttgctggtcaggcccatg

SEQ ID NO: 2078 - DNA, 201 bp, Homo sapiens
ggcagaccctggatctgaagtgcgtggtgcccgggcaggcccacgcccaggtcacgtggcacaagcgtggaggaaacctccctgcccggcaccaggtccayggcccactgctgaggctgaaccaggtgtccccggctgactctggcgagtactcgtgccaagtgaccggaagctcaggcaccctggaggcatctgtcctgg

SEQ ID NO: 2079 - DNA, 201 bp, Homo sapiens
gtctgcggctcccccaggtctcaccagctgattctggagaatatgtgtgccgtgtggagaatggatcgggccccaaggaggcctccattactgtgtctgtrctccacggcacccattctggccccagctacaccccagtgcccggcagcacccggcccatccgcatcgagccctcctcctcacacgtggcggaagggcaga

SEQ ID NO: 2080 - DNA, 201 bp, Homo sapiens
gccatcccacaccactggccctgggccatttccacaccgtgaccctgctgcgcagcctcacccagggctccctgattgtgggtgacctggccccggtcaaygggacctcccagggcaagttccagggcctggatctgaacgaggaactctacctgggtggctatcctgactatggtgccatccccaaggcggggctgagca

SEQ ID NO: 2081 - DNA, 201 bp, Homo sapiens
tcaggctaccccactcctgacatcagctggagcaagctggatggcagcctgccacctgacagccgcctggagaacaacatgctgatgctgccctcagtccraccccaggacgcaggtacctacgtctgcaccgccactaaccgccagggcaaggtcaaagcctttgcccacctgcaggtgccagagcgggtggtgccctac

SEQ ID NO: 2082 - DNA, 201 bp, Homo sapiens
gtccgtgtgcctgctggttctgcagctgtcttcccctgcatagcctcaggctaccccactcctgacatcagctggagcaagctggatggcagcctgccacytgacagccgcctggagaacaacatgctgatgctgccctcagtccgaccccaggacgcaggtacctacgtctgcaccgccactaaccgccagggcaaggtc

SEQ ID NO: 2083 - DNA, 174 bp, Homo sapiens
agagaggagggggatatgaccaccctgccccatctgcaggagcctgaagatccagctcaagtgccatcctgccagtggcccccagactgtggggttgggaygcctggcctctgtgtcctagaagggaccctcctgtggtctttgtcttgatttttcttaataaacggtgctatc

SEQ ID NO: 2084 - DNA, 201 bp, Homo sapiens
cctccctgcccggcaccagacccacggctcgctgctgcggctgcaccaggtgaccccggccgactcaggcgagtatgtgtgccatgtggtgggcacctccrgccccctagaggcctcagtcctggtcaccatcgaagcctctgtcatccctggacccatcccacctgtcaggatcgagtcttcatcctccacagtggccga

SEQ ID NO: 2085 - DNA, 201 bp, Homo sapiens
cccggcccatccgcatcgagccctcctcctcacacgtggcggaagggcagaccctggatctgaactgcgtggtgcccgggcaggcccacgcccaggtcacrtggcacaagcgtgggggcagcctccctgcccggcaccagacccacggctcgctgctgcggctgcaccaggtgaccccggccgactcaggcgagtatgtgt

SEQ ID NO: 2086 - DNA, 201 bp, Homo sapiens
gggccagcaacggcatggaggcctccatcacggtcacagtaactgggacccagggggccaacttagcctaccctgccggcagcacccagcccatccgcatygagccctcctcctcgcaagtggcggaagggcagaccctggatctgaactgcgtggtgcccgggcagtcccatgcccaggtcacgtggcacaagcgtgggg

SEQ ID NO: 2087 - DNA, 201 bp, Homo sapiens
ggtgcccgggcaggcccatgcccaggtcacgtggtacaagcgcgggggcagcctccccgcccggcaccagacccatggctcccagctgcggctccacctcrtctcccctgccgactcaggcgagtatgtgtgtcgtgcagccagcggcccaggccctgagcaagaagcctccttcacagtcaccgtcccgcccagtgaggg

SEQ ID NO: 2088 - DNA, 201 bp, Homo sapiens
ccgctgcagcgccacagggagccccacgcccaccctcgagtggacagggggccccggcggccagctccctgcgaaggcacaaatccacggcggcatcctgygcctgccagctgtcgagcccacggatcaggcccagtacttgtgccgagcccacagcagcgctgggcagcaggtggccagggctgtgctccacgtgcatgg

SEQ ID NO: 2089 - DNA, 201 bp, Homo sapiens
ccgccccggccagagacaaccatcatgcgacagccaccagtcacccacgctcctcagcccctgcttcccggttccgtcaggcccctgccctgtgggccccrggaggccgcatgccgcaatgggcactgcatccccagagactacctctgcgacggacaggaggactgcgaggacggcagcgatgagctagactgtggcccc

SEQ ID NO: 2090 - DNA, 201 bp, Homo sapiens
agatgccccattggctattctggcttgtcctgcgagagctgtgatgcccacttcactcgggtgcctggtgggccctacctgggcacctgctctggttgcarttgcaatggccatgccagctcctgtgaccctgtgtatggccactgcctgaattgccagcacaacacggaggggccacagtgcaacaagtgcaaggctggc

SEQ ID NO: 2091 - DNA, 201 bp, Homo sapiens
tgcccgggcagtcccatgcccaggtcacgtggcacaagcgtgggggcagcctccctgtccggcaccagacccacggctccctgctgagactctaccaagcrtcccccgccgactcgggcgagtacgtgtgccgagtgttgggcagctccgtgcctctagaggcctctgtcctggtcaccattgagcctgcgggctcagtgc

SEQ ID NO: 2092 - DNA, 201 bp, Homo sapiens
ccgagcccacagcagcgctgggcagcaggtggccagggctgtgctccacgtgcatgggggcggtgggcccagagtccaagtgagcccagagaggacccagrtccacgcaggccgcaccgtcaggctgtactgcagggctgcaggcgtgcctagcgccaccatcacctggaggaaggaagggggcagcctcccaccacaggc

SEQ ID NO: 2093 - DNA, 201 bp, Homo sapiens
ggcacaagcgcgggggcagcctcccggcccggcaccaggtgcatggctcgaggctacgcctgctccaggtgaccccagctgattcaggggagtacgtgtgycgtgtggtcggcagctcaggtacccaggaagcctcagtccttgtcaccatccagcagcgccttagtggctcccactcccagggtgtggcgtaccccgtcc

SEQ ID NO: 2094 - DNA, 201 bp, Homo sapiens
gatcacgggcaacaacatcatgctagtggcctcccagccagcgctgcagggccctgagaggaggagctacgagatcatgttccgagaggaattctggcgcyggcccgatgggcagccggccacacgcgagcacctcctgatggcactggccgacctggatgagctcctgatccgggccacgttctcctccgtgccgctggc

SEQ ID NO: 2095 - DNA, 201 bp, Homo sapiens
tgtgcagaccgtggtggttggccacgccgtggagttcgaatgcctggcactgggtgaccccaagcctcaggtgacatggagcaaagttggagggcacctgyggccaggcattgtgcagagcggaggtgtcgtcaggatcgcccacgtagagctggctgatgcgggacagtatcgctgcactgccaccaacgcagctggcac

SEQ ID NO: 2096 - DNA, 201 bp, Homo sapiens
ctccacccactttgcccctggggacttccaaggctttgccctggtgaacccacagcgaaacagccgcctgacaggagaattcactgtggaacccgtgcccragggtgcccagctctcttttggcaactttgcccaactcggccatgagtccttctactggcagctgccggagacataccagggagacaaggtggcggccta

SEQ ID NO: 2097 - DNA, 201 bp, Homo sapiens
atggccccaggggcccctcaggtccaagctgaagaagctgagctgactgtggaggctggacacacggccaccttgcgctgctcagccacaggcagccccgygcccaccatccactggtccaagctgcgttccccactgccctggcagcaccggctggaaggtgacacactcatcataccccgggtagcccagcaggactcg

SEQ ID NO: 2098 - DNA, 201 bp, Homo sapiens
acgagttggcccgtggcatgctggagccagtgcagcggccggacgtggtcctcgtgggtgccgggtaccgcctcctctcccgaggccacacacccacccamcctggtgctctgaaccagcgccaggtccagttctctgaggagcactgggtccatgagtctggccggccggtgcagcgcgcggagctgctgcaggtgctgc

SEQ ID NO: 2099 - DNA, 201 bp, Homo sapiens
gcagcggggacttccagatggtttatttccgagccctggtgaatttcactcgctccatcgagtacagccctcagctggaggatgcaggctccagagagttycgagaggtgtccgaggctgtggtagacacgctggagtcggagtacttgaaaattcccggagaccaggttgtcagtgtggtgttcatcaaggagctggatg

SEQ ID NO: 2100 - DNA, 201 bp, Homo sapiens
cccggatcagcagcacccctgccaagttggagcagcggacatatgggctcatggacagccacgcggtgctgcagatttcatcagctaaaccatcagatgcrggcacttatgtgtgccttgctcagaatgcactaggcacagcacagaagcaggtggaggtgatcgtggacacgggcgccatggccccaggggcccctcagg

SEQ ID NO: 2101 - DNA, 201 bp, Homo sapiens
cgcccctggctactatggcaaccccagccagggccagccatgccagagagacagccaggtgccagggcccataggctgcaactgtgacccccaaggcagcrtcagcagccagtgtgatgctgctggtcagtgccagtgcaaggcccaggtggaaggcctcacttgcagccactgccggccccaccacttccacctgagtgc

SEQ ID NO: 2102 - DNA, 201 bp, Homo sapiens
tccatgagtctggccggccggtgcagcgcgcggagctgctgcaggtgctgcagagcctggaggccgtgctcatccagaccgtgtacaacaccaagatggcyagcgtgggacttagcgacatcgccatggataccaccgtcacccatgccaccagccatggccgtgcccacagtgtggaggagtgcagatgccccattggct

SEQ ID NO: 2103 - DNA, 201 bp, Homo sapiens
caacaaggtggactcctatggcggctccctgcgttacaacgtgcgctacgagttggcccgtggcatgctggagccagtgcagcggccggacgtggtcctcrtgggtgccgggtaccgcctcctctcccgaggccacacacccacccaacctggtgctctgaaccagcgccaggtccagttctctgaggagcactgggtcca

SEQ ID NO: 2104 - DNA, 201 bp, Homo sapiens
cacggatggccaagccacatgtgacgcctgtgccccaggctacactggccgccgctgtgagagctgtgcccccggatacgagggcaaccccatccagcccrgcgggaagtgcaggcccgtcaaccaggagattgtgcgctgtgacgagcgtggcagcatggggacctccggggaggcctgccgctgtaagaacaatgtggt

SEQ ID NO: 2105 - DNA, 201 bp, Homo sapiens
accgccccggccagagacaaccatcatgcgacagccaccagtcacccacgctcctcagcccctgcttcccggttccgtcaggcccctgccctgtgggcccmaggaggccgcatgccgcaatgggcactgcatccccagagactacctctgcgacggacaggaggactgcgaggacggcagcgatgagctagactgtggccc

SEQ ID NO: 2106 - DNA, 201 bp, Homo sapiens
ctgaggacatagagaccgtcacagcaagccaaatgcgctggacacattcgtacctttctgatgatgaggacatgctggctgacagcatctcaggagacgamctgggcagtggggacctgggcagcggggacttccagatggtttatttccgagccctggtgaatttcactcgctccatcgagtacagccctcagctggagg

SEQ ID NO: 2107 - DNA, 201 bp, Homo sapiens
gctgcggctgcaccatgtgtccccggccgactcgggtgaatacgtgtgccgggtgatgggcagctctggccccctggaggcctcagtcctggtcaccatcraagcctctggctcaagtgctgtccacgtccccgccccaggtggagccccacccatccgcatcgagccctcctcctcccgagtggcagaagggcagaccct

SEQ ID NO: 2108 - DNA, 201 bp, Homo sapiens
cagctggagcaagctggatggcagcctgccacctgacagccgcctggagaacaacatgctgatgctgccctcagtccgaccccaggacgcaggtacctacrtctgcaccgccactaaccgccagggcaaggtcaaagcctttgcccacctgcaggtgccagagcgggtggtgccctacttcacgcagaccccctactcctt

SEQ ID NO: 2109 - DNA, 201 bp, Homo sapiens
tgtcagtgccggggagccccgctcctctgctcgttggacccggatcagcagcacccctgccaagttggagcagcggacatatgggctcatggacagccacrcggtgctgcagatttcatcagctaaaccatcagatgcgggcacttatgtgtgccttgctcagaatgcactaggcacagcacagaagcaggtggaggtgat

SEQ ID NO: 2110 - DNA, 201 bp, Homo sapiens
ctgggtacctgtgaacgctgcagctgccatggccactcagaggcctgcgagccagaaacaggtgcctgccagggctgccagcatcacacggagggccctcrgtgtgagcagtgccagccaggatactacggggacgcccagcgggggacaccacaggactgccagctgtgcccctgctacggagaccctgctgccggccag

SEQ ID NO: 2111 - DNA, 201 bp, Homo sapiens
agggactcctccaacagacaacggacggacggatgccgctggtgctcaggaagagctagtgccttaggtgggggaaggcaggactcacgactgagagagasaggagggggatatgaccaccctgccccatctgcaggagcctgaagatccagctcaagtgccatcctgccagtggcccccagactgtggggttgggacgcc

SEQ ID NO: 2112 - DNA, 201 bp, Homo sapiens
tggagtatcgctgtgaccggcggcccgactgcagggacatgtctgatgagctcaattgtgaggagccagtcctgggtatcagccccacattctctctcctygtggagacgacatctttaccgccccggccagagacaaccatcatgcgacagccaccagtcacccacgctcctcagcccctgcttcccggttccgtcaggc

SEQ ID NO: 2113 - DNA, 201 bp, Homo sapiens
cgcagcccggcacgccacccctctcctccacgcagctgcagatcgacccatccctgcacgagttccagctagtcgacctgtcccgccgcttcctcgtccaygactccttctgggctctgcctgaacagttcctgggcaacaaggtggactcctatggcggctccctgcgttacaacgtgcgctacgagttggcccgtggca

SEQ ID NO: 2114 - DNA, 201 bp, Homo sapiens
cacaagcgcgggggcagcctcccggcccggcaccaggtgcatggctcgaggctacgcctgctccaggtgaccccagctgattcaggggagtacgtgtgccrtgtggtcggcagctcaggtacccaggaagcctcagtccttgtcaccatccagcagcgccttagtggctcccactcccagggtgtggcgtaccccgtccgc

SEQ ID NO: 2115 - DNA, 201 bp, Homo sapiens
ccggcccggcaccaggtgcatggctcgaggctacgcctgctccaggtgaccccagctgattcaggggagtacgtgtgccgtgtggtcggcagctcaggtayccaggaagcctcagtccttgtcaccatccagcagcgccttagtggctcccactcccagggtgtggcgtaccccgtccgcatcgagtcctcctcagcctcc

SEQ ID NO: 2116 - DNA, 201 bp, Homo sapiens
cactgccctggcagcaccggctggaaggtgacacactcatcataccccgggtagcccagcaggactcgggccagtacatctgcaatgccactagccctgcygggcacgctgaggccaccatcatcctgcacgtggagagcccaccatatgccaccacggtcccagagcacgcttcggtgcaggcaggggagacggtgcagc

SEQ ID NO: 2117 - DNA, 201 bp, Homo sapiens; identical to SEQ ID NO: 2035

SEQ ID NO: 2118 - DNA, 201 bp, Homo sapiens; identical to SEQ ID NO: 2036

SEQ ID NO: 2119 - DNA, 201 bp, Homo sapiens; identical to SEQ ID NO: 2037

SEQ ID NO: 2120 - DNA, 201 bp, Homo sapiens; identical to SEQ ID NO: 2038

SEQ ID NO: 2121 - DNA, 201 bp, Homo sapiens; identical to SEQ ID NO: 2039

SEQ ID NO: 2122 - DNA, 201 bp, Homo sapiens; identical to SEQ ID NO: 2041

SEQ ID NO: 2123 - DNA, 201 bp, Homo sapiens; identical to SEQ ID NO: 2042

SEQ ID NO: 2124 - DNA, 201 bp, Homo sapiens; identical to SEQ ID NO: 2043

SEQ ID NO: 2125 - DNA, 201 bp, Homo sapiens; identical to SEQ ID NO: 2044

SEQ ID NO: 2126 - DNA, 201 bp, Homo sapiens; identical to SEQ ID NO: 2045

SEQ ID NO: 2127 - DNA, 201 bp, Homo sapiens; identical to SEQ ID NO: 2046

SEQ ID NO: 2128 - DNA, 201 bp, Homo sapiens; identical to SEQ ID NO: 2047

SEQ ID NO: 2129 - DNA, 201 bp, Homo sapiens; identical to SEQ ID NO: 2048

SEQ ID NO: 2130 - DNA, 201 bp, Homo sapiens; identical to SEQ ID NO: 2049

SEQ ID NO: 2131 - DNA, 201 bp, Homo sapiens; identical to SEQ ID NO: 2050

SEQ ID NO: 2132 - DNA, 201 bp, Homo sapiens; identical to SEQ ID NO: 2051

SEQ ID NO: 2133 - DNA, 201 bp, Homo sapiens; identical to SEQ ID NO: 2052

SEQ ID NO: 2134 - DNA, 201 bp, Homo sapiens; identical to SEQ ID NO: 2053

SEQ ID NO: 2135 - DNA, 201 bp, Homo sapiens; identical to SEQ ID NO: 2054

SEQ ID NO: 2136 - DNA, 201 bp, Homo sapiens; identical to SEQ ID NO: 2055

SEQ ID NO: 2137 - DNA, 201 bp, Homo sapiens; identical to SEQ ID NO: 2056

SEQ ID NO: 2138 - DNA, 201 bp, Homo sapiens; identical to SEQ ID NO: 2057

SEQ ID NO: 2139 - DNA, 201 bp, Homo sapiens; identical to SEQ ID NO: 2060

SEQ ID NO: 2140 - DNA, 201 bp, Homo sapiens; identical to SEQ ID NO: 2061

SEQ ID NO: 2141 - DNA, 201 bp, Homo sapiens; identical to SEQ ID NO: 2062

SEQ ID NO: 2142 - DNA, 201 bp, Homo sapiens; identical to SEQ ID NO: 2063

SEQ ID NO: 2143 - DNA, 201 bp, Homo sapiens; identical to SEQ ID NO: 2064

SEQ ID NO: 2144 - DNA, 201 bp, Homo sapiens; identical to SEQ ID NO: 2065

SEQ ID NO: 2145 - DNA, 201 bp, Homo sapiens; identical to SEQ ID NO: 2066

SEQ ID NO: 2146 - DNA, 201 bp, Homo sapiens; identical to SEQ ID NO: 2067

SEQ ID NO: 2147 - DNA, 201 bp, Homo sapiens; identical to SEQ ID NO: 2068

SEQ ID NO: 2148 - DNA, 201 bp, Homo sapiens; identical to SEQ ID NO: 2069

SEQ ID NO: 2149 - DNA, 201 bp, Homo sapiens; identical to SEQ ID NO: 2070

SEQ ID NO: 2150 - DNA, 201 bp, Homo sapiens; identical to SEQ ID NO: 2071

SEQ ID NO: 2151 - DNA, 201 bp, Homo sapiens; identical to SEQ ID NO: 2072

SEQ ID NO: 2152 - DNA, 201 bp, Homo sapiens; identical to SEQ ID NO: 2073

SEQ ID NO: 2153 - DNA, 201 bp, Homo sapiens; identical to SEQ ID NO: 2074

SEQ ID NO: 2154 - DNA, 201 bp, Homo sapiens; identical to SEQ ID NO: 2075

SEQ ID NO: 2155 - DNA, 201 bp, Homo sapiens; identical to SEQ ID NO: 2076

SEQ ID NO: 2156 - DNA, 201 bp, Homo sapiens; identical to SEQ ID NO: 2077

SEQ ID NO: 2157 - DNA, 201 bp, Homo sapiens; identical to SEQ ID NO: 2078

SEQ ID NO: 2158 - DNA, 201 bp, Homo sapiens; identical to SEQ ID NO: 2079

SEQ ID NO: 2159 - DNA, 201 bp, Homo sapiens; identical to SEQ ID NO: 2080

SEQ ID NO: 2160 - DNA, 201 bp, Homo sapiens; identical to SEQ ID NO: 2081

SEQ ID NO: 2161 - DNA, 201 bp, Homo sapiens; identical to SEQ ID NO: 2082

SEQ ID NO: 2162 - DNA, 181 bp, Homo sapiens
gctacctgagacgggcatcgcaggagtctctgccacccactcaggattgggaattgtctttagtgccggctgtggagcaaaaggcagctcacccctgggaygcctggcctctgtgtcctagaagggaccctcctgtggtctttgtcttgatttttcttaataaacggtgctatccccgcca

SEQ ID NO: 2163 - DNA, 201 bp, Homo sapiens; identical to SEQ ID NO: 2084

SEQ ID NO: 2164 - DNA, 201 bp, Homo sapiens; identical to SEQ ID NO: 2085

SEQ ID NO: 2165 - DNA, 201 bp, Homo sapiens; identical to SEQ ID NO: 2086

SEQ ID NO: 2166 - DNA, 201 bp, Homo sapiens; identical to SEQ ID NO: 2087

SEQ ID NO: 2167 - DNA, 201 bp, Homo sapiens; identical to SEQ ID NO: 2088

SEQ ID NO: 2168 - DNA, 201 bp, Homo sapiens; identical to SEQ ID NO: 2089

SEQ ID NO: 2169 - DNA, 201 bp, Homo sapiens; identical to SEQ ID NO: 2090

SEQ ID NO: 2170 - DNA, 201 bp, Homo sapiens; identical to SEQ ID NO: 2091

SEQ ID NO: 2171 - DNA, 201 bp, Homo sapiens; identical to SEQ ID NO: 2092

SEQ ID NO: 2172 - DNA, 201 bp, Homo sapiens; identical to SEQ ID NO: 2093

SEQ ID NO: 2173 - DNA, 201 bp, Homo sapiens; identical to SEQ ID NO: 2094

SEQ ID NO: 2174 - DNA, 201 bp, Homo sapiens; identical to SEQ ID NO: 2095

SEQ ID NO: 2175 - DNA, 201 bp, Homo sapiens; identical to SEQ ID NO: 2096

SEQ ID NO: 2176 - DNA, 201 bp, Homo sapiens; identical to SEQ ID NO: 2097

SEQ ID NO: 2177 - DNA, 201 bp, Homo sapiens; identical to SEQ ID NO: 2098

SEQ ID NO: 2178 - DNA, 201 bp, Homo sapiens; identical to SEQ ID NO: 2100

SEQ ID NO: 2179 - DNA, 201 bp, Homo sapiens; identical to SEQ ID NO: 2099

SEQ ID NO: 2180 - DNA, 201 bp, Homo sapiens; identical to SEQ ID NO: 2101

SEQ ID NO: 2181 - DNA, 201 bp, Homo sapiens; identical to SEQ ID NO: 2102

SEQ ID NO: 2182 - DNA, 201 bp, Homo sapiens; identical to SEQ ID NO: 2103

SEQ ID NO: 2183 - DNA, 201 bp, Homo sapiens; identical to SEQ ID NO: 2104

SEQ ID NO: 2184 - DNA, 201 bp, Homo sapiens; identical to SEQ ID NO: 2105

SEQ ID NO: 2185 - DNA, 201 bp, Homo sapiens; identical to SEQ ID NO: 2106

SEQ ID NO: 2186 - DNA, 201 bp, Homo sapiens; identical to SEQ ID NO: 2107

SEQ ID NO: 2187 - DNA, 201 bp, Homo sapiens; identical to SEQ ID NO: 2108

SEQ ID NO: 2188 - DNA, 201 bp, Homo sapiens; identical to SEQ ID NO: 2109

SEQ ID NO: 2189 - DNA, 201 bp, Homo sapiens; identical to SEQ ID NO: 2110

SEQ ID NO: 2190 - DNA, 201 bp, Homo sapiens; identical to SEQ ID NO: 2112

SEQ ID NO: 2191 - DNA, 201 bp, Homo sapiens; identical to SEQ ID NO: 2113

SEQ ID NO: 2192 - DNA, 201 bp, Homo sapiens; identical to SEQ ID NO: 2114

SEQ ID NO: 2193 - DNA, 201 bp, Homo sapiens; identical to SEQ ID NO: 2115

SEQ ID NO: 2194 - DNA, 201 bp, Homo sapiens; identical to SEQ ID NO: 2116

SEQ ID NO: 2195 - DNA, 201 bp, Homo sapiens; identical to SEQ ID NO: 2035

SEQ ID NO: 2196 - DNA, 201 bp, Homo sapiens; identical to SEQ ID NO: 2036

SEQ ID NO: 2197 - DNA, 201 bp, Homo sapiens; identical to SEQ ID NO: 2037

SEQ ID NO: 2198 - DNA, 201 bp, Homo sapiens; identical to SEQ ID NO: 2038

SEQ ID NO: 2199 - DNA, 201 bp, Homo sapiens; identical to SEQ ID NO: 2039

SEQ ID NO: 2200 - DNA, 201 bp, Homo sapiens; identical to SEQ ID NO: 2041

SEQ ID NO: 2201 - DNA, 201 bp, Homo sapiens; identical to SEQ ID NO: 2042

SEQ ID NO: 2202 - DNA, 201 bp, Homo sapiens; identical to SEQ ID NO: 2043

SEQ ID NO: 2203 - DNA, 201 bp, Homo sapiens; identical to SEQ ID NO: 2044

SEQ ID NO: 2204 - DNA, 201 bp, Homo sapiens; identical to SEQ ID NO: 2045

SEQ ID NO: 2205 - DNA, 201 bp, Homo sapiens; identical to SEQ ID NO: 2046

SEQ ID NO: 2206 - DNA, 201 bp, Homo sapiens; identical to SEQ ID NO: 2047

SEQ ID NO: 2207 - DNA, 201 bp, Homo sapiens; identical to SEQ ID NO: 2048

SEQ ID NO: 2208 - DNA, 201 bp, Homo sapiens; identical to SEQ ID NO: 2049

SEQ ID NO: 2209 - DNA, 201 bp, Homo sapiens; identical to SEQ ID NO: 2050

SEQ ID NO: 2210 - DNA, 201 bp, Homo sapiens; identical to SEQ ID NO: 2051

SEQ ID NO: 2211 - DNA, 201 bp, Homo sapiens; identical to SEQ ID NO: 2052

SEQ ID NO: 2212 - DNA, 201 bp, Homo sapiens; identical to SEQ ID NO: 2053

SEQ ID NO: 2213 - DNA, 201 bp, Homo sapiens; identical to SEQ ID NO: 2054

SEQ ID NO: 2214 - DNA, 201 bp, Homo sapiens; identical to SEQ ID NO: 2055

SEQ ID NO: 2215 - DNA, 201 bp, Homo sapiens; identical to SEQ ID NO: 2056

SEQ ID NO: 2216 - DNA, 201 bp, Homo sapiens; identical to SEQ ID NO: 2057

SEQ ID NO: 2217 - DNA, 201 bp, Homo sapiens; identical to SEQ ID NO: 2060

SEQ ID NO: 2218 - DNA, 201 bp, Homo sapiens; identical to SEQ ID NO: 2061

SEQ ID NO: 2219 - DNA, 201 bp, Homo sapiens; identical to SEQ ID NO: 2062

SEQ ID NO: 2220 - DNA, 201 bp, Homo sapiens; identical to SEQ ID NO: 2063

SEQ ID NO: 2221 - DNA, 201 bp, Homo sapiens; identical to SEQ ID NO: 2064

SEQ ID NO: 2222 - DNA, 201 bp, Homo sapiens; identical to SEQ ID NO: 2065

SEQ ID NO: 2223 - DNA, 201 bp, Homo sapiens; identical to SEQ ID NO: 2066

SEQ ID NO: 2224 - DNA, 201 bp, Homo sapiens; identical to SEQ ID NO: 2067

SEQ ID NO: 2225 - DNA, 201 bp, Homo sapiens; identical to SEQ ID NO: 2068

SEQ ID NO: 2226 - DNA, 201 bp, Homo sapiens
ctgggcagtggggacctgggcagcggggacttccagatggggagctggatggctgggtttttgtggagctggatgtgggctcggaagggaatgcggatggkgctcagattcaggagatgctgctcagggtcatctccagcggctctgtggcctcctacgtcacctctccccagggattccagttccgacgcctgggcacag

SEQ ID NO: 2227 - DNA, 201 bp, Homo sapiens
atgctggctgacagcatctcaggagacgacctgggcagtggggacctgggcagcggggacttccagatggggagctggatggctgggtttttgtggagctsgatgtgggctcggaagggaatgcggatggggctcagattcaggagatgctgctcagggtcatctccagcggctctgtggcctcctacgtcacctctcccc

SEQ ID NO: 2228 - DNA, 201 bp, Homo sapiens; identical to SEQ ID NO: 2071

SEQ ID NO: 2229 - DNA, 201 bp, Homo sapiens; identical to SEQ ID NO: 2072

SEQ ID NO: 2230 - DNA, 201 bp, Homo sapiens; identical to SEQ ID NO: 2073

SEQ ID NO: 2231 - DNA, 201 bp, Homo sapiens; identical to SEQ ID NO: 2074

SEQ ID NO: 2232 - DNA, 201 bp, Homo sapiens; identical to SEQ ID NO: 2075

SEQ ID NO: 2233 - DNA, 201 bp, Homo sapiens; identical to SEQ ID NO: 2076

SEQ ID NO: 2234 - DNA, 201 bp, Homo sapiens; identical to SEQ ID NO: 2077

SEQ ID NO: 2235 - DNA, 201 bp, Homo sapiens; identical to SEQ ID NO: 2078

SEQ ID NO: 2236 - DNA, 201 bp, Homo sapiens; identical to SEQ ID NO: 2079

SEQ ID NO: 2237 - DNA, 201 bp, Homo sapiens; identical to SEQ ID NO: 2080

SEQ ID NO: 2238 - DNA, 201 bp, Homo sapiens; identical to SEQ ID NO: 2081

SEQ ID NO: 2239 - DNA, 201 bp, Homo sapiens; identical to SEQ ID NO: 2082

SEQ ID NO: 2240 - DNA, 181 bp, Homo sapiens; identical to SEQ ID NO: 2162

SEQ ID NO: 2241 - DNA, 201 bp, Homo sapiens; identical to SEQ ID NO: 2084

SEQ ID NO: 2242 - DNA, 201 bp, Homo sapiens; identical to SEQ ID NO: 2085

SEQ ID NO: 2243 - DNA, 201 bp, Homo sapiens; identical to SEQ ID NO: 2086

SEQ ID NO: 2244 - DNA, 201 bp, Homo sapiens; identical to SEQ ID NO: 2087

SEQ ID NO: 2245 - DNA, 201 bp, Homo sapiens; identical to SEQ ID NO: 2089

SEQ ID NO: 2246 - DNA, 201 bp, Homo sapiens; identical to SEQ ID NO: 2088

SEQ ID NO: 2247 - DNA, 201 bp, Homo sapiens; identical to SEQ ID NO: 2090

SEQ ID NO: 2248 - DNA, 201 bp, Homo sapiens; identical to SEQ ID NO: 2091

SEQ ID NO: 2249 - DNA, 201 bp, Homo sapiens; identical to SEQ ID NO: 2092

SEQ ID NO: 2250 - DNA, 201 bp, Homo sapiens; identical to SEQ ID NO: 2093

SEQ ID NO: 2251 - DNA, 201 bp, Homo sapiens; identical to SEQ ID NO: 2094

SEQ ID NO: 2252 - DNA, 201 bp, Homo sapiens; identical to SEQ ID NO: 2095

SEQ ID NO: 2253 - DNA, 201 bp, Homo sapiens; identical to SEQ ID NO: 2096

SEQ ID NO: 2254 - DNA, 201 bp, Homo sapiens; identical to SEQ ID NO: 2097

SEQ ID NO: 2255 - DNA, 201 bp, Homo sapiens; identical to SEQ ID NO: 2098

SEQ ID NO: 2256 - DNA, 201 bp, Homo sapiens; identical to SEQ ID NO: 2100

SEQ ID NO: 2257 - DNA, 201 bp, Homo sapiens; identical to SEQ ID NO: 2101

SEQ ID NO: 2258 - DNA, 201 bp, Homo sapiens
tccatgagtctggccggccggtgcagcgcgcggagctgctgcaggtgctgcagagcctggaggccgtgctcatccagaccgtgtacaacaccaagatggcyagcgtgggacttagcgacatcgccatggataccaccgtcacccatgccaccagccatggccgtgcccacagtgtggaggagtgcaggtgcctgagccggc

SEQ ID NO: 2259 - DNA, 201 bp, Homo sapiens; identical to SEQ ID NO: 2103

SEQ ID NO: 2260 - DNA, 201 bp, Homo sapiens; identical to SEQ ID NO: 2104

SEQ ID NO: 2261 - DNA, 201 bp, Homo sapiens; identical to SEQ ID NO: 2105

SEQ ID NO: 2262 - DNA, 201 bp, Homo sapiens
ctgaggacatagagaccgtcacagcaagccaaatgcgctggacacattcgtacctttctgatgatgaggacatgctggctgacagcatctcaggagacgamctgggcagtggggacctgggcagcggggacttccagatggggagctggatggctgggtttttgtggagctggatgtgggctcggaagggaatgcggatgg

SEQ ID NO: 2263 - DNA, 201 bp, Homo sapiens; identical to SEQ ID NO: 2107

SEQ ID NO: 2264 - DNA, 201 bp, Homo sapiens; identical to SEQ ID NO: 2108

SEQ ID NO: 2265 - DNA, 201 bp, Homo sapiens; identical to SEQ ID NO: 2110

SEQ ID NO: 2266 - DNA, 201 bp, Homo sapiens; identical to SEQ ID NO: 2109

SEQ ID NO: 2267 - DNA, 201 bp, Homo sapiens; identical to SEQ ID NO: 2112

SEQ ID NO: 2268 - DNA, 201 bp, Homo sapiens; identical to SEQ ID NO: 2113

SEQ ID NO: 2269 - DNA, 201 bp, Homo sapiens; identical to SEQ ID NO: 2114

SEQ ID NO: 2270 - DNA, 201 bp, Homo sapiens; identical to SEQ ID NO: 2115

SEQ ID NO: 2271 - DNA, 201 bp, Homo sapiens; identical to SEQ ID NO: 2116

SEQ ID NO: 2272 - DNA, 201 bp, Homo sapiens
agtcttccctgcccaccatccccatcatgggtatcgttgctggcctggttgtccttgcagctgtagtcactggagctgcggtcgctgctgtgctgtggagraagaagagctcagattgaaaaggagggagctactctcaggctgcaatgtgaaacagctgccctgtgtgggactgagtggcaagtccctttgtgacttcaa

SEQ ID NO: 2273 - DNA, 201 bp, Homo sapiens
gcacagactgacagaatgaacctgcagaccctgcgcggctactacaaccagagcgaggccagttctcacaccctccagtggatgattggctgcgacctggkgtccgacggacgcctcctccgcgggtatgaacagtatgcctacgatggcaaggattacctcgccctgaacgaggacctgcgctcctggaccgcagcggac

SEQ ID NO: 2274 - DNA, 201 bp, Homo sapiens
ccaaggcccacgcacagactgacagaatgaacctgcagaccctgcgcggctactacaaccagagcgaggccagttctcacaccctccagtggatgattggytgcgacctggggtccgacggacgcctcctccgcgggtatgaacagtatgcctacgatggcaaggattacctcgccctgaacgaggacctgcgctcctgga

SEQ ID NO: 2275 - DNA, 201 bp, Homo sapiens
gggcgggctcccactccatgaggtatttcagcgccgccgtgtcccggcccggccgcggggagccccgcttcatcgccatgggctacgtggacgacacgcarttcgtgcggttcgacagcgactcggcgtgtccgaggatggagccgcgggcgccgtgggtggagcaggaggggccggagtattgggaagaggagacacgga

SEQ ID NO: 2276 - DNA, 201 bp, Homo sapiens
gacctgggcgggctcccactccatgaggtatttcagcgccgccgtgtcccggcccggccgcggggagccccgcttcatcgccatgggctacgtggacgacwcgcagttcgtgcggttcgacagcgactcggcgtgtccgaggatggagccgcgggcgccgtgggtggagcaggaggggccggagtattgggaagaggagac

SEQ ID NO: 2277 - DNA, 201 bp, Homo sapiens
acccaggacgtggagctcgtggagaccaggcctgcaggggatggaaccttccagaagtgggcagctgtggtggtgccttctggagaggagcagagatacaygtgccatgtgcagcatgaggggctgccggagcccctcatgctgagatggaagcagtcttccctgcccaccatccccatcatgggtatcgttgctggcctg

SEQ ID NO: 2278 - DNA, 201 bp, Homo sapiens
aaaggagagcctacctggagggcacgtgcgtggagtggctccacagatacctggagaacgggaaggagatgctgcagcgcgcggacccccccaagacacaygtgacccaccaccctgtctttgactatgaggccaccctgaggtgctgggccctgggcttctaccctgcggagatcatactgacctggcagcgggatgggg

SEQ ID NO: 2279 - DNA, 201 bp, Homo sapiens
acacgtgccatgtgcagcatgaggggctgccggagcccctcatgctgagatggaagcagtcttccctgcccaccatccccatcatgggtatcgttgctggyctggttgtccttgcagctgtagtcactggagctgcggtcgctgctgtgctgtggagaaagaagagctcagattgaaaaggagggagctactctcaggctg

SEQ ID NO: 2280 - DNA, 199 bp, Homo sapiens
cagaaaaggggctgggatgtctccgtctctgtctcaaatttgtggtgcactgagctataacttacttctgtattaaaattagaatctgagtataaatttastttttcaaattatttccaagagagattgatgggttaattaaaggagaagattcctgaaatttgagagacaaaataaatggaagacatgagaactttcc

SEQ ID NO: 2281 - DNA, 201 bp, Homo sapiens
cccaggacgtggagctcgtggagaccaggcctgcaggggatggaaccttccagaagtgggcagctgtggtggtgccttctggagaggagcagagatacacrtgccatgtgcagcatgaggggctgccggagcccctcatgctgagatggaagcagtcttccctgcccaccatccccatcatgggtatcgttgctggcctgg

SEQ ID NO: 2282 - DNA, 201 bp, Homo sapiens
ttcctgttccagaaaaggggctgggatgtctccgtctctgtctcaaatttgtggtgcactgagctataacttacttctgtattaaaattagaatctgagtrtaaatttactttttcaaattatttccaagagagattgatgggttaattaaaggagaagattcctgaaatttgagagacaaaataaatggaagacatgaga

SEQ ID NO: 2283 - DNA, 201 bp, Homo sapiens
gaacctgcagaccctgcgcggctactacaaccagagcgaggccagttctcacaccctccagtggatgattggctgcgacctggggtccgacggacgcctcmtccgcgggtatgaacagtatgcctacgatggcaaggattacctcgccctgaacgaggacctgcgctcctggaccgcagcggacactgcggctcagatctc

SEQ ID NO: 2284 - DNA, 201 bp, Homo sapiens
tgaccctcttcctcatgctgaactgcattccttccccaatcacctttcctgttccagaaaaggggctgggatgtctccgtctctgtctcaaatttgtggtscactgagctataacttacttctgtattaaaattagaatctgagtataaatttactttttcaaattatttccaagagagattgatgggttaattaaaggag

SEQ ID NO: 2285 - DNA, 201 bp, Homo sapiens
ccatgggctacgtggacgacacgcagttcgtgcggttcgacagcgactcggcgtgtccgaggatggagccgcgggcgccgtgggtggagcaggaggggccrgagtattgggaagaggagacacggaacaccaaggcccacgcacagactgacagaatgaacctgcagaccctgcgcggctactacaaccagagcgaggcca

SEQ ID NO: 2286 - DNA, 201 bp, Homo sapiens
agattgaaaaggagggagctactctcaggctgcaatgtgaaacagctgccctgtgtgggactgagtggcaagtccctttgtgacttcaagaaccctgactyctctttctgcagagaccagcccacccctgtgcccaccatgaccctcttcctcatgctgaactgcattccttccccaatcacctttcctgttccagaaaag

SEQ ID NO: 2287 - DNA, 201 bp, Homo sapiens
aaaggagggagctactctcaggctgcaatgtgaaacagctgccctgtgtgggactgagtggcaagtccctttgtgacttcaagaaccctgacttctctttstgcagagaccagcccacccctgtgcccaccatgaccctcttcctcatgctgaactgcattccttccccaatcacctttcctgttccagaaaaggggctgg

SEQ ID NO: 2288 - DNA, 168 bp, Homo sapiens
tctcaaatttgtggtgcactgagctataacttacttctgtattaaaattagaatctgagtataaatttactttttcaaattatttccaagagagattgatdggttaattaaaggagaagattcctgaaatttgagagacaaaataaatggaagacatgagaactttcc

SEQ ID NO: 2289 - DNA, 201 bp, Homo sapiens
agtatgcctacgatggcaaggattacctcgccctgaacgaggacctgcgctcctggaccgcagcggacactgcggctcagatctccaagcgcaagtgtgargcggccaatgtggctgaacaaaggagagcctacctggagggcacgtgcgtggagtggctccacagatacctggagaacgggaaggagatgctgcagcgcg

SEQ ID NO: 2290 - DNA, 201 bp, Homo sapiens
tttgtcttgaggagatgtcctggactcacacggaaacttagggctacggaatgaagacgccaaggatggtggtcatggcgccccgaaccctcttcctgctrctctcgggggccctgaccctgaccgagacctgggcgggctcccactccatgaggtatttcagcgccgccgtgtcccggcccggccgcggggagccccgct

SEQ ID NO: 2291 - DNA, 201 bp, Homo sapiens
ggcctgcaggggatggaaccttccagaagtgggcagctgtggtggtgccttctggagaggagcagagatacacgtgccatgtgcagcatgaggggctgccrgagcccctcatgctgagatggaagcagtcttccctgcccaccatccccatcatgggtatcgttgctggcctggttgtccttgcagctgtagtcactggag

SEQ ID NO: 2292 - DNA, 201 bp, Homo sapiens
tatagtaacatagtgtggtactttgtcttgaggagatgtcctggactcacacggaaacttagggctacggaatgaagacgccaaggatggtggtcatggcrccccgaaccctcttcctgctgctctcgggggccctgaccctgaccgagacctgggcgggctcccactccatgaggtatttcagcgccgccgtgtcccggc

SEQ ID NO: 2293 - DNA, 201 bp, Homo sapiens
acagaatgaacctgcagaccctgcgcggctactacaaccagagcgaggccagttctcacaccctccagtggatgattggctgcgacctggggtccgacggwcgcctcctccgcgggtatgaacagtatgcctacgatggcaaggattacctcgccctgaacgaggacctgcgctcctggaccgcagcggacactgcggctc

SEQ ID NO: 2294 - DNA, 201 bp, Homo sapiens
gggaagaggagacacggaacaccaaggcccacgcacagactgacagaatgaacctgcagaccctgcgcggctactacaaccagagcgaggccagttctcayaccctccagtggatgattggctgcgacctggggtccgacggacgcctcctccgcgggtatgaacagtatgcctacgatggcaaggattacctcgccctga

SEQ ID NO: 2295 - DNA, 201 bp, Homo sapiens
agtcttccctgcccaccatccccatcatgggtatcgttgctggcctggttgtccttgcagctgtagtcactggagctgcggtcgctgctgtgctgtggagraagaagagctcagattgaaaaggagggagctactctcaggctgcaagtaagtatgaaggaggctgatccctgagatccttgggatcttgtgtttgggagc

SEQ ID NO: 2296 - DNA, 201 bp, Homo sapiens; identical to SEQ ID NO: 2273

SEQ ID NO: 2297 - DNA, 201 bp, Homo sapiens; identical to SEQ ID NO: 2274

SEQ ID NO: 2298 - DNA, 201 bp, Homo sapiens; identical to SEQ ID NO: 2275

SEQ ID NO: 2299 - DNA, 201 bp, Homo sapiens; identical to SEQ ID NO: 2276

SEQ ID NO: 2300 - DNA, 201 bp, Homo sapiens; identical to SEQ ID NO: 2277

SEQ ID NO: 2301 - DNA, 201 bp, Homo sapiens; identical to SEQ ID NO: 2278

SEQ ID NO: 2302 - DNA, 201 bp, Homo sapiens; identical to SEQ ID NO: 2279

SEQ ID NO: 2303 - DNA, 178 bp, Homo sapiens
cagaaaaggggctgggatgtctccgtctctgtctcaaatttgtggtgcactgagctataacttacttctgtattaaaattagaatctgagtataaatttastttttcaaattatttccaagagagattgatgggttaattaaaggagaagattcctgaaatttgagagacaaaataaa

SEQ ID NO: 2304 - DNA, 201 bp, Homo sapiens
tctctcacggcttgtaaatgtgacaccccggggggcctgatgtgtgtgggttgttgaggggaacagtggacatagctgtgctatgaggtttctttgacttsaatgtattgagcatgtgatgggctgtttaaagtgtcacccctcactgtgactgatatgaatttgttcatgaatatttttctgtagtgtgaaacagctgcc

SEQ ID NO: 2305 - DNA, 201 bp, Homo sapiens; identical to SEQ ID NO: 2281

SEQ ID NO: 2306 - DNA, 201 bp, Homo sapiens
tctaggcagtgacagtgcccagggctctaatgtgtctctcacggcttgtaaatgtgacaccccggggggcctgatgtgtgtgggttgttgaggggaacagbggacatagctgtgctatgaggtttctttgacttgaatgtattgagcatgtgatgggctgtttaaagtgtcacccctcactgtgactgatatgaatttgtt

SEQ ID NO: 2307 - DNA, 187 bp, Homo sapiens
ttcctgttccagaaaaggggctgggatgtctccgtctctgtctcaaatttgtggtgcactgagctataacttacttctgtattaaaattagaatctgagtrtaaatttactttttcaaattatttccaagagagattgatgggttaattaaaggagaagattcctgaaatttgagagacaaaataaa

SEQ ID NO: 2308 - DNA, 201 bp, Homo sapiens; identical to SEQ ID NO: 2283

SEQ ID NO: 2309 - DNA, 201 bp, Homo sapiens
ttctactctaggcagtgacagtgcccagggctctaatgtgtctctcacggcttgtaaatgtgacaccccggggggcctgatgtgtgtgggttgttgagggvaacagtggacatagctgtgctatgaggtttctttgacttgaatgtattgagcatgtgatgggctgtttaaagtgtcacccctcactgtgactgatatgaa

SEQ ID NO: 2310 - DNA, 201 bp, Homo sapiens; identical to SEQ ID NO: 2284

SEQ ID NO: 2311 - DNA, 201 bp, Homo sapiens; identical to SEQ ID NO: 2285

SEQ ID NO: 2312 - DNA, 201 bp, Homo sapiens
ctgatatgaatttgttcatgaatatttttctgtagtgtgaaacagctgccctgtgtgggactgagtggcaagtccctttgtgacttcaagaaccctgactyctctttctgcagagaccagcccacccctgtgcccaccatgaccctcttcctcatgctgaactgcattccttccccaatcacctttcctgttccagaaaag

SEQ ID NO: 2313 - DNA, 201 bp, Homo sapiens
gaatttgttcatgaatatttttctgtagtgtgaaacagctgccctgtgtgggactgagtggcaagtccctttgtgacttcaagaaccctgacttctctttstgcagagaccagcccacccctgtgcccaccatgaccctcttcctcatgctgaactgcattccttccccaatcacctttcctgttccagaaaaggggctgg

SEQ ID NO: 2314 - DNA, 147 bp, Homo sapiens
tctcaaatttgtggtgcactgagctataacttacttctgtattaaaattagaatctgagtataaatttactttttcaaattatttccaagagagattgatdggttaattaaaggagaagattcctgaaatttgagagacaaaataaa

SEQ ID NO: 2315 - DNA, 201 bp, Homo sapiens; identical to SEQ ID NO: 2289

SEQ ID NO: 2316 - DNA, 149 bp, Homo sapiens
cccattaggtgacaggtttttagagaagccaatcagcgtcgccgcggtyctggttctaaagtcctcgctcacccacccggactcattctccccagacgccaaggatggtggtcatggcgccccgaaccctcttcctgctgctctcgggg

SEQ ID NO: 2317 - DNA, 201 bp, Homo sapiens
cgccgcggtcctggttctaaagtcctcgctcacccacccggactcattctccccagacgccaaggatggtggtcatggcgccccgaaccctcttcctgctrctctcgggggccctgaccctgaccgagacctgggcgggctcccactccatgaggtatttcagcgccgccgtgtcccggcccggccgcggggagccccgct

SEQ ID NO: 2318 - DNA, 201 bp, Homo sapiens; identical to SEQ ID NO: 2291

SEQ ID NO: 2319 - DNA, 201 bp, Homo sapiens
tttagagaagccaatcagcgtcgccgcggtcctggttctaaagtcctcgctcacccacccggactcattctccccagacgccaaggatggtggtcatggcrccccgaaccctcttcctgctgctctcgggggccctgaccctgaccgagacctgggcgggctcccactccatgaggtatttcagcgccgccgtgtcccggc

SEQ ID NO: 2320 - DNA, 201 bp, Homo sapiens; identical to SEQ ID NO: 2293

SEQ ID NO: 2321 - DNA, 201 bp, Homo sapiens; identical to SEQ ID NO: 2294

SEQ ID NO: 2322 - DNA, 161 bp, Homo sapiens
gccgtgtcccggcccggccgcggggagccccgcttcatcgccatgggctacgtggacgacwcgcagttcgtgcggttcgacagcgactcggcgtgtccgaggatggagccgcgggcgccgtgggtggagcaggaggggccggagtattgggaagaggagac

SEQ ID NO: 2323 - DNA, 170 bp, Homo sapiens
ctgacagaatgaacctgcagaccctgcgcggctactacaaccagagcgaggccaagcagtcttccctgcccaccatccccatcatgggtatcgttgctggyctggttgtccttgcagctgtagtcactggagctgcggtcgctgctgtgctgtggagaaagaagagctca

SEQ ID NO: 2324 - DNA, 113 bp, Homo sapiens
agtcttccctgcccaccatccccatcatgggtatcgttgctggcctggttgtccttgcagctgtagtcactggagctgcggtcgctgctgtgctgtggagraagaagagctca

SEQ ID NO: 2325 - DNA, 201 bp, Homo sapiens; identical to SEQ ID NO: 2285

SEQ ID NO: 2326 - DNA, 166 bp, Homo sapiens
gccgtgtcccggcccggccgcggggagccccgcttcatcgccatgggctacgtggacgacacgcarttcgtgcggttcgacagcgactcggcgtgtccgaggatggagccgcgggcgccgtgggtggagcaggaggggccggagtattgggaagaggagacacgga

SEQ ID NO: 2327 - DNA, 201 bp, Homo sapiens; identical to SEQ ID NO: 2290

SEQ ID NO: 2328 - DNA, 201 bp, Homo sapiens; identical to SEQ ID NO: 2276

SEQ ID NO: 2329 - DNA, 201 bp, Homo sapiens; identical to SEQ ID NO: 2292

SEQ ID NO: 2330 - DNA, 170 bp, Homo sapiens; identical to SEQ ID NO: 2323

SEQ ID NO: 2331 - DNA, 113 bp, Homo sapiens; identical to SEQ ID NO: 2324

SEQ ID NO: 2332 - DNA, 201 bp, Homo sapiens; identical to SEQ ID NO: 2285

SEQ ID NO: 2333 - DNA, 201 bp, Homo sapiens; identical to SEQ ID NO: 2275

SEQ ID NO: 2334 - DNA, 201 bp, Homo sapiens; identical to SEQ ID NO: 2287

SEQ ID NO: 2335 - DNA, 168 bp, Homo sapiens; identical to SEQ ID NO: 2288

SEQ ID NO: 2336 - DNA, 201 bp, Homo sapiens; identical to SEQ ID NO: 2272

SEQ ID NO: 2337 - DNA, 166 bp, Homo sapiens; identical to SEQ ID NO: 2326

SEQ ID NO: 2338 - DNA, 161 bp, Homo sapiens; identical to SEQ ID NO: 2322

SEQ ID NO: 2339 - DNA, 201 bp, Homo sapiens; identical to SEQ ID NO: 2291

SEQ ID NO: 2340 - DNA, 201 bp, Homo sapiens; identical to SEQ ID NO: 2279

SEQ ID NO: 2341 - DNA, 201 bp, Homo sapiens; identical to SEQ ID NO: 2277

SEQ ID NO: 2342 - DNA, 201 bp, Homo sapiens; identical to SEQ ID NO: 2281

SEQ ID NO: 2343 - DNA, 199 bp, Homo sapiens; identical to SEQ ID NO: 2280

SEQ ID NO: 2344 - DNA, 201 bp, Homo sapiens; identical to SEQ ID NO: 2282

SEQ ID NO: 2345 - DNA, 201 bp, Homo sapiens; identical to SEQ ID NO: 2284

SEQ ID NO: 2346 - DNA, 201 bp, Homo sapiens; identical to SEQ ID NO: 2286

SEQ ID NO: 2347 - DNA, 201 bp, Homo sapiens; identical to SEQ ID NO: 2285

SEQ ID NO: 2348 - DNA, 201 bp, Homo sapiens; identical to SEQ ID NO: 2272

SEQ ID NO: 2349 - DNA, 201 bp, Homo sapiens; identical to SEQ ID NO: 2275

SEQ ID NO: 2350 - DNA, 201 bp, Homo sapiens; identical to SEQ ID NO: 2276

SEQ ID NO: 2351 - DNA, 201 bp, Homo sapiens; identical to SEQ ID NO: 2277

SEQ ID NO: 2352 - DNA, 201 bp, Homo sapiens; identical to SEQ ID NO: 2279

SEQ ID NO: 2353 - DNA, 201 bp, Homo sapiens
agacacggaacaccaaggcccacgcacagactgacagaatgaacctgcagaccctgcgcggctactacaaccagagcgaggccaacccccccaagacacaygtgacccaccaccctgtctttgactatgaggccaccctgaggtgctgggccctgggcttctaccctgcggagatcatactgacctggcagcgggatgggg

SEQ ID NO: 2354 - DNA, 199 bp, Homo sapiens; identical to SEQ ID NO: 2280

SEQ ID NO: 2355 - DNA, 201 bp, Homo sapiens; identical to SEQ ID NO: 2281

SEQ ID NO: 2356 - DNA, 201 bp, Homo sapiens; identical to SEQ ID NO: 2282

SEQ ID NO: 2357 - DNA, 201 bp, Homo sapiens; identical to SEQ ID NO: 2284

SEQ ID NO: 2358 - DNA, 201 bp, Homo sapiens; identical to SEQ ID NO: 2285

SEQ ID NO: 2359 - DNA, 201 bp, Homo sapiens; identical to SEQ ID NO: 2286

SEQ ID NO: 2360 - DNA, 201 bp, Homo sapiens; identical to SEQ ID NO: 2287

SEQ ID NO: 2361 - DNA, 168 bp, Homo sapiens; identical to SEQ ID NO: 2288

SEQ ID NO: 2362 - DNA, 201 bp, Homo sapiens; identical to SEQ ID NO: 2290

SEQ ID NO: 2363 - DNA, 201 bp, Homo sapiens; identical to SEQ ID NO: 2291

SEQ ID NO: 2364 - DNA, 201 bp, Homo sapiens; identical to SEQ ID NO: 2292

SEQ ID NO: 2365 - DNA, 201 bp, Homo sapiens
caggatggagccggaggggccggaatattgggaagaggagacagggaccgccaaggccaaagcacagttttaccgagtgaacctgcggaccctgagcggcyactacaaccagagtgaggcctgtgagtgacaccggccgggggcgcagatcactacccctctacatcccccacggaccgcccgggtctccccgagtctctg

SEQ ID NO: 2366 - DNA, 201 bp, Homo sapiens
gacaccggccgggggcgcagatcactacccctctacatcccccacggaccgcccgggtctccccgagtctctgggtccgagatccacgccgaggcagcggvacctggagaccctttacccgggagaggcccaggagccgttacccggtttcattttcagccaaaatccccgcaggggctgccagccacacagagtcatgga

SEQ ID NO: 2367 - DNA, 201 bp, Homo sapiens
cgcagatcactacccctctacatcccccacggaccgcccgggtctccccgagtctctgggtccgagatccacgccgaggcagcggaacctggagacccttbacccgggagaggcccaggagccgttacccggtttcattttcagccaaaatccccgcaggggctgccagccacacagagtcatggacaggtctctacagac

SEQ ID NO: 2368 - DNA, 201 bp, Homo sapiens
aaagcacagttttaccgagtgaacctgcggaccctgagcggctactacaaccagagtgaggcctgtgagtgacaccggccgggggcgcagatcactacccstctacatcccccacggaccgcccgggtctccccgagtctctgggtccgagatccacgccgaggcagcggaacctggagaccctttacccgggagaggccc

SEQ ID NO: 2369 - DNA, 201 bp, Homo sapiens
tccactccttgaggtatttccacaccaccatgtcccggcccggccgcgcggatccccgcttcctctccgtgggcgacgtggacgacacgcagtgcgtgcgsctcgacagcgacgccacgagtcccaggatggagccggaggggccggaatattgggaagaggagacagggaccgccaaggccaaagcacagttttaccgag

SEQ ID NO: 2370 - DNA, 184 bp, Homo sapiens
attaggagatgtcctggactcacacagaaactcagggctatggaatgaagggcaagctcactctctggcaacaagctccctggvgtgatttttcttctagaagagtccacggggacagggtttctcttctccctctcccaacctgtgtcgggtccttcttcctggatactcaccaggctgcccc

SEQ ID NO: 2371 - DNA, 201 bp, Homo sapiens
tggcaacaagctccctggagtgatttttcttctagaagagtccacggggacagggtttctcttctccctctcccaacctgtgtcgggtccttcttcctggmtactcaccaggctgccccagttctcactcccattgagtgtcgggttcctagagaagccaatcaatgtagccgcggtcccggttctaaagttcccacgcac

SEQ ID NO: 2372 - DNA, 201 bp, Homo sapiens
gctccctggagtgatttttcttctagaagagtccacggggacagggtttctcttctccctctcccaacctgtgtcgggtccttcttcctggatactcaccmggctgccccagttctcactcccattgagtgtcgggttcctagagaagccaatcaatgtagccgcggtcccggttctaaagttcccacgcacccaccggga

SEQ ID NO: 2373 - DNA, 201 bp, Homo sapiens
ggacagggtttctcttctccctctcccaacctgtgtcgggtccttcttcctggatactcaccaggctgccccagttctcactcccattgagtgtcgggttyctagagaagccaatcaatgtagccgcggtcccggttctaaagttcccacgcacccaccgggactccgattctccccagtcgccgaggatggtgtcatggc

SEQ ID NO: 2374 - DNA, 201 bp, Homo sapiens
gttctcactcccattgagtgtcgggttcctagagaagccaatcaatgtagccgcggtcccggttctaaagttcccacgcacccaccgggactccgattctycccagtcgccgaggatggtgtcatggcgccccgaaccctgcttctgctgctctcgggggccctggtcctgacccagacctgggcaggcttccactccttg

SEQ ID NO: 2375 - DNA, 201 bp, Homo sapiens
cggcccggccgcgcggatccccgcttcctctccgtgggcgacgtggacgacacgcagtgcgtgcggctcgacagcgacgccacgagtcccaggatggagcmggaggggccggaatattgggaagaggagacagggaccgccaaggccaaagcacagttttaccgagtgaacctgcggaccctgagcggctactacaaccag

SEQ ID NO: 2376 - DNA, 201 bp, Homo sapiens
gagtgaacctgcggaccctgagcggctactacaaccagagtgaggcctgtgagtgacaccggccgggggcgcagatcactacccctctacatcccccacgraccgcccgggtctccccgagtctctgggtccgagatccacgccgaggcagcggaacctggagaccctttacccgggagaggcccaggagccgttacccgg

SEQ ID NO: 2377 - DNA, 201 bp, Homo sapiens
cgccaaggccaaagcacagttttaccgagtgaacctgcggaccctgagcggctactacaaccagagtgaggcctgtgagtgacaccggccgggggcgcagvtcactacccctctacatcccccacggaccgcccgggtctccccgagtctctgggtccgagatccacgccgaggcagcggaacctggagaccctttacccg

SEQ ID NO: 2378 - DNA, 201 bp, Homo sapiens
gcacagttttaccgagtgaacctgcggaccctgagcggctactacaaccagagtgaggcctgtgagtgacaccggccgggggcgcagatcactacccctcyacatcccccacggaccgcccgggtctccccgagtctctgggtccgagatccacgccgaggcagcggaacctggagaccctttacccgggagaggcccagg

SEQ ID NO: 2379 - DNA, 201 bp, Homo sapiens; identical to SEQ ID NO: 2289

SEQ ID NO: 2380 - DNA, 201 bp, Homo sapiens; identical to SEQ ID NO: 2273

SEQ ID NO: 2381 - DNA, 201 bp, Homo sapiens; identical to SEQ ID NO: 2274

SEQ ID NO: 2382 - DNA, 201 bp, Homo sapiens
gggcaggctcccactccatgaggtatttcagcgccgccgtgtcccggcccggccgcggggagccccgcttcatcgccatgggctacgtggacgacacgcarttcgtgcggttcgacagcgactcggcgtgtccgaggatggagccgcgggcgccgtgggtggagcaggaggggccggagtattgggaagaggagacacgga

SEQ ID NO: 2383 - DNA, 201 bp, Homo sapiens
gacctgggcaggctcccactccatgaggtatttcagcgccgccgtgtcccggcccggccgcggggagccccgcttcatcgccatgggctacgtggacgacwcgcagttcgtgcggttcgacagcgactcggcgtgtccgaggatggagccgcgggcgccgtgggtggagcaggaggggccggagtattgggaagaggagac

SEQ ID NO: 2384 - DNA, 176 bp, Homo sapiens
gcgtggagtggctccacagatacctggagaacgggaaggagatgctgcagcgcgcggggccatcttcccagcccacattcctcatcatgggcatcgttacygtcctggttgttctaggtgctgtggtcactgctgtgatgtggaagaataagaccccaggtaggaaaggggtgagt

SEQ ID NO: 2385 - DNA, 201 bp, Homo sapiens; identical to SEQ ID NO: 2293

SEQ ID NO: 2386 - DNA, 182 bp, Homo sapiens
gcacgtgcgtggagtggctccacagatacctggagaacgggaaggagatgctgcagcgcgcggggccatcttcccagcccacattcctcatcatgggcatygttaccgtcctggttgttctaggtgctgtggtcactgctgtgatgtggaagaataagaccccaggtaggaaaggggtgagt

SEQ ID NO: 2387 - DNA, 190 bp, Homo sapiens
cctggagggcacgtgcgtggagtggctccacagatacctggagaacgggaaggagatgctgcagcgcgcggggccatcttcccagcccacattcctcatcrtgggcatcgttaccgtcctggttgttctaggtgctgtggtcactgctgtgatgtggaagaataagaccccaggtaggaaaggggtgagt

SEQ ID NO: 2388 - DNA, 195 bp, Homo sapiens
gcctacctggagggcacgtgcgtggagtggctccacagatacctggagaacgggaaggagatgctgcagcgcgcggggccatcttcccagcccacattccycatcatgggcatcgttaccgtcctggttgttctaggtgctgtggtcactgctgtgatgtggaagaataagaccccaggtaggaaaggggtgagt

SEQ ID NO: 2389 - DNA, 201 bp, Homo sapiens; identical to SEQ ID NO: 2283

SEQ ID NO: 2390 - DNA, 201 bp, Homo sapiens; identical to SEQ ID NO: 2294

SEQ ID NO: 2391 - DNA, 201 bp, Homo sapiens; identical to SEQ ID NO: 2285

SEQ ID NO: 2392 - DNA, 201 bp, Homo sapiens; identical to SEQ ID NO: 2287

SEQ ID NO: 2393 - DNA, 168 bp, Homo sapiens; identical to SEQ ID NO: 2288

SEQ ID NO: 2394 - DNA, 201 bp, Homo sapiens; identical to SEQ ID NO: 2272

SEQ ID NO: 2395 - DNA, 166 bp, Homo sapiens; identical to SEQ ID NO: 2326

SEQ ID NO: 2396 - DNA, 161 bp, Homo sapiens; identical to SEQ ID NO: 2322

SEQ ID NO: 2397 - DNA, 201 bp, Homo sapiens; identical to SEQ ID NO: 2291

SEQ ID NO: 2398 - DNA, 201 bp, Homo sapiens; identical to SEQ ID NO: 2277

SEQ ID NO: 2399 - DNA, 201 bp, Homo sapiens; identical to SEQ ID NO: 2279

SEQ ID NO: 2400 - DNA, 201 bp, Homo sapiens; identical to SEQ ID NO: 2353

SEQ ID NO: 2401 - DNA, 201 bp, Homo sapiens; identical to SEQ ID NO: 2281

SEQ ID NO: 2402 - DNA, 199 bp, Homo sapiens; identical to SEQ ID NO: 2280

SEQ ID NO: 2403 - DNA, 201 bp, Homo sapiens; identical to SEQ ID NO: 2282

SEQ ID NO: 2404 - DNA, 201 bp, Homo sapiens; identical to SEQ ID NO: 2284

SEQ ID NO: 2405 - DNA, 201 bp, Homo sapiens; identical to SEQ ID NO: 2285

SEQ ID NO: 2406 - DNA, 201 bp, Homo sapiens; identical to SEQ ID NO: 2286

SEQ ID NO: 2407 - DNA, 201 bp, Homo sapiens; identical to SEQ ID NO: 2272

SEQ ID NO: 2408 - DNA, 201 bp, Homo sapiens; identical to SEQ ID NO: 2273

SEQ ID NO: 2409 - DNA, 201 bp, Homo sapiens; identical to SEQ ID NO: 2274

SEQ ID NO: 2410 - DNA, 201 bp, Homo sapiens; identical to SEQ ID NO: 2275

SEQ ID NO: 2411 - DNA, 201 bp, Homo sapiens; identical to SEQ ID NO: 2276

SEQ ID NO: 2412 - DNA, 201 bp, Homo sapiens; identical to SEQ ID NO: 2277

SEQ ID NO: 2413 - DNA, 201 bp, Homo sapiens; identical to SEQ ID NO: 2278

SEQ ID NO: 2414 - DNA, 201 bp, Homo sapiens; identical to SEQ ID NO: 2279

SEQ ID NO: 2415 - DNA, 199 bp, Homo sapiens; identical to SEQ ID NO: 2280

SEQ ID NO: 2416 - DNA, 201 bp, Homo sapiens; identical to SEQ ID NO: 2281

SEQ ID NO: 2417 - DNA, 201 bp, Homo sapiens; identical to SEQ ID NO: 2282

SEQ ID NO: 2418 - DNA, 201 bp, Homo sapiens; identical to SEQ ID NO: 2283

SEQ ID NO: 2419 - DNA, 201 bp, Homo sapiens; identical to SEQ ID NO: 2284

SEQ ID NO: 2420 - DNA, 201 bp, Homo sapiens; identical to SEQ ID NO: 2285

SEQ ID NO: 2421 - DNA, 201 bp, Homo sapiens; identical to SEQ ID NO: 2286

SEQ ID NO: 2422 - DNA, 201 bp, Homo sapiens; identical to SEQ ID NO: 2287

SEQ ID NO: 2423 - DNA, 168 bp, Homo sapiens; identical to SEQ ID NO: 2288

SEQ ID NO: 2424 - DNA, 201 bp, Homo sapiens; identical to SEQ ID NO: 2289

SEQ ID NO: 2425 - DNA, 149 bp, Homo sapiens; identical to SEQ ID NO: 2316

SEQ ID NO: 2426 - DNA, 201 bp, Homo sapiens; identical to SEQ ID NO: 2317

SEQ ID NO: 2427 - DNA, 201 bp, Homo sapiens; identical to SEQ ID NO: 2291

SEQ ID NO: 2428 - DNA, 201 bp, Homo sapiens; identical to SEQ ID NO: 2319

SEQ ID NO: 2429 - DNA, 201 bp, Homo sapiens; identical to SEQ ID NO: 2293

SEQ ID NO: 2430 - DNA, 201 bp, Homo sapiens; identical to SEQ ID NO: 2294

SEQ ID NO: 2431 - DNA, 201 bp, Homo sapiens
ccaggtgcctggcagtggcatggcagcactgggtggatgcccaaggggcagagcagctggtgcggaccctgccagccttccagaagtctgtgccacagccrcgcaccgtggagctttccctgcttgccagccccggggccccttcgttttcaggggaggggggaacggggcagcatcaggcctccacagccaggcaaaagg

SEQ ID NO: 2432 - DNA, 201 bp, Homo sapiens
ctaggaggtggaagggtacagcactttgccacatctcttctacgatgccaccagtgcctgatgcccttgcgtgttttgcctgtactgcacgggctccaagkgtaagttcactgggagtcccaggctggctctggaggctgccttggttcgagggcttagttggcaacaaccactctcctcgccttctcaggaggtgccacc

SEQ ID NO: 2433 - DNA, 201 bp, Homo sapiens
ttctataaattgagcccgcagcctcccgcttcgctctctgctcctcctgttcgacagtcagccgcatcttcttttgcgtcgccagccgagccacatcgctsagacaccatggggaaggtgaaggtcggagtcaacggatttggtcgtattgggcgcctggtcaccagggctgcttttaactctggtaaagtggatattgtt

SEQ ID NO: 2434 - DNA, 201 bp, Homo sapiens
ctcctccacctttgacgctggggctggcattgccctcaacgaccactttgtcaagctcatttcctggtatgacaacgaatttggctacagcaacagggtgrtggacctcatggcccacatggcctccaaggagtaagacccctggaccaccagccccagcaagagcacaagaggaagagagagaccctcactgctggggag

SEQ ID NO: 2435 - DNA, 201 bp, Homo sapiens
gcaaggtcatccctgagctgaacgggaagctcactggcatggccttccgtgtccccactgccaacgtgtcagtggtggacctgacctgccgtctagaaaamcctgccaaatatgatgacatcaagaaggtggtgaagcaggcgtcggagggccccctcaagggcatcctgggctacactgagcaccaggtggtctcctctg

SEQ ID NO: 2436 - DNA, 201 bp, Homo sapiens
accactttgtcaagctcatttcctggtatgacaacgaatttggctacagcaacagggtggtggacctcatggcccacatggcctccaaggagtaagacccytggaccaccagccccagcaagagcacaagaggaagagagagaccctcactgctggggagtccctgccacactcagtcccccaccacactgaatctcccct

SEQ ID NO: 2437 - DNA, 201 bp, Homo sapiens
gtcagtggtggacctgacctgccgtctagaaaaacctgccaaatatgatgacatcaagaaggtggtgaagcaggcgtcggagggccccctcaagggcatcytgggctacactgagcaccaggtggtctcctctgacttcaacagcgacacccactcctccacctttgacgctggggctggcattgccctcaacgaccactt

SEQ ID NO: 2438 - DNA, 170 bp, Homo sapiens
aggaagagagagaccctcactgctggggagtccctgccacactcagtcccccaccacactgaatctcccctcctcacagttgccatgtagaccccttgaaraggggaggggcctagggagccgcaccttgtcatgtaccatcaataaagtaccctgtgctcaaccagtta

SEQ ID NO: 2439 - DNA, 201 bp, Homo sapiens
gtggtgaagcaggcgtcggagggccccctcaagggcatcctgggctacactgagcaccaggtggtctcctctgacttcaacagcgacacccactcctccayctttgacgctggggctggcattgccctcaacgaccactttgtcaagctcatttcctggtatgacaacgaatttggctacagcaacagggtggtggacctc

SEQ ID NO: 2440 - DNA, 201 bp, Homo sapiens
ttgacgctggggctggcattgccctcaacgaccactttgtcaagctcatttcctggtatgacaacgaatttggctacagcaacagggtggtggacctcatkgcccacatggcctccaaggagtaagacccctggaccaccagccccagcaagagcacaagaggaagagagagaccctcactgctggggagtccctgccaca

SEQ ID NO: 2441 - DNA, 201 bp, Homo sapiens
tgaagcaggcgtcggagggccccctcaagggcatcctgggctacactgagcaccaggtggtctcctctgacttcaacagcgacacccactcctccaccttygacgctggggctggcattgccctcaacgaccactttgtcaagctcatttcctggtatgacaacgaatttggctacagcaacagggtggtggacctcatgg

SEQ ID NO: 2442 - DNA, 201 bp, Homo sapiens
acgtcgtggagtccactggcgtcttcaccaccatggagaaggctggggctcatttgcaggggggagccaaaagggtcatcatctctgccccctctgctgaygcccccatgttcgtcatgggtgtgaaccatgagaagtatgacaacagcctcaagatcatcagcaatgcctcctgcaccaccaactgcttagcacccctgg

SEQ ID NO: 2443 - DNA, 146 bp, Homo sapiens
ggggagtccctgccacactcagtcccccaccacactgaatctcccctcctcacagttgccatgtagaccccttgaagaggggaggggcctagggagccgcmccttgtcatgtaccatcaataaagtaccctgtgctcaaccagtta

SEQ ID NO: 2444 - DNA, 189 bp, Homo sapiens
gccccagcaagagcacaagaggaagagagagaccctcactgctggggagtccctgccacactcagtcccccaccacactgaatctcccctcctcacagttkccatgtagaccccttgaagaggggaggggcctagggagccgcaccttgtcatgtaccatcaataaagtaccctgtgctcaaccagtta

SEQ ID NO: 2445 - DNA, 201 bp, Homo sapiens
cgtgtcagtggtggacctgacctgccgtctagaaaaacctgccaaatatgatgacatcaagaaggtggtgaagcaggcgtcggagggccccctcaagggcrtcctgggctacactgagcaccaggtggtctcctctgacttcaacagcgacacccactcctccacctttgacgctggggctggcattgccctcaacgacca

SEQ ID NO: 2446 - DNA, 201 bp, Homo sapiens
cactgccaacgtgtcagtggtggacctgacctgccgtctagaaaaacctgccaaatatgatgacatcaagaaggtggtgaagcaggcgtcggagggccccytcaagggcatcctgggctacactgagcaccaggtggtctcctctgacttcaacagcgacacccactcctccacctttgacgctggggctggcattgccct

SEQ ID NO: 2447 - DNA, 201 bp, Homo sapiens
acctgccaaatatgatgacatcaagaaggtggtgaagcaggcgtcggagggccccctcaagggcatcctgggctacactgagcaccaggtggtctcctctkacttcaacagcgacacccactcctccacctttgacgctggggctggcattgccctcaacgaccactttgtcaagctcatttcctggtatgacaacgaatt

SEQ ID NO: 2448 - DNA, 176 bp, Homo sapiens
atggggccacttaccagcttccgaagggctccctcatccagcccagctaaggcctcgtccgccatctcgctggccyctagctccgtcggttcctttctggtgagatccccagtgcctgtggcacctgtcaccagctcagagaattctgcaggggacagacatgaatcaggcatgct

SEQ ID NO: 2449 - DNA, 201 bp, Homo sapiens
gaagcggggaaggaaggttgtcctgtcgggctgggggctcccgggaatccggaggccagcagtggaaccgcaaggctctacagggcagatctgcctcccgkgctgtctcagctacgccgagtcgttggctcagggcggaggattttcctattggccgcgttatttgaatggaatggaggataggtcgtgaagtaggtgctg

SEQ ID NO: 2450 - DNA, 201 bp, Homo sapiens
gctgaaatgtagcagtttggtggatccgaggtcagtcattgaaaatgtattgattggcacctattctttgtgaatcattattctgggttctggggtcacargagcaaatgaaacaaatgaagtacctgccatcaatgagcttacattctagtaaagagggacagaaaatgaatacattttaaatgaataaattcagatacc

SEQ ID NO: 2451 - DNA, 201 bp, Homo sapiens
ttctttgtgaatcattattctgggttctggggtcacaggagcaaatgaaacaaatgaagtacctgccatcaatgagcttacattctagtaaagagggacaraaaatgaatacattttaaatgaataaattcagataccgctaaatgtagtgaagaaaaaaattgggctaaagagagcgaaaaacaatttctgaagttacta

SEQ ID NO: 2452 - DNA, 143 bp, Homo sapiens
attcctccggcctcagatgaccaggcaccactagatacagaayactgtgctttccttctccaagctttttctttcctggctgatgatttgtcattctagtcacttcctgccttgtgaccacacacccaggcttgacaaagctg

SEQ ID NO: 2453 - DNA, 201 bp, Homo sapiens
tgcgttatgaagagctaatttactggacaaagaattccaaagcaaaaccagaacagtatgaatttgagcaggtctcataggttgagcaatttccccctaaaccaactgaaggctaaaaagcaacaggccattgtgaaccaatgcaagacgccctctatcatggtgaaaagctccatcaatgaggtatcttctttagtggtg

SEQ ID NO: 2454 - DNA, 201 bp, Homo sapiens
ccctgttcctggaggtcagcatttgatctgttgcaagcccctctttctgtcccctcttcctaccctgcctcccatgactttgctcctcacacttttggaaycatgccttccgggggggcccatctcttctggccgtccttgtctctgggccacttggagtgtgtgataaatcagtcaagctgttgaagtctcaggagtctc

SEQ ID NO: 2455 - DNA, 201 bp, Homo sapiens
gaggggaaacatcacacctgccctaaaccctgttcctggaggtcagcatttgatctgttgcaagcccctctttctgtcccctcttcctaccctgcctcccwtgactttgctcctcacacttttggaaccatgccttccgggggggcccatctcttctggccgtccttgtctctgggccacttggagtgtgtgataaatcag

SEQ ID NO: 2456 - DNA, 106 bp, Homo sapiens
gatgatttcccccctccgcctccaggaagaaagaatgttactgccttaataaaaaatgaaaagagaatgatgctcaaaatctttccaaataaaatgttccytatat

SEQ ID NO: 2457 - DNA, 201 bp, Homo sapiens
gaaagaagttattttccaggtacccttctcgcttttgccattagccaaggatagaagctgcagtggtattaattttgatataatctttcaaaccagcttcwtgtggcttcccttttctttgttcaagatgagggccaggaggggaaacatcacacctgccctaaaccctgttcctggaggtcagcatttgatctgttgcaa

SEQ ID NO: 2458 - DNA, 201 bp, Homo sapiens
ccactagatacagaatactgtgctttccttctccaagctttttctttcctggctgatgatttgtcattctagtcacttcctgccttgtgaccacacacccrggcttgacaaagctgttctgcagatcagaaagaaggggttcctggtcatacaccagtactaccaaggacagcttttttcctgcaagatctgttacctaaa

SEQ ID NO: 2459 - DNA, 201 bp, Homo sapiens
tctagagcttagcatatctgattgttgtcaggccatattatcaatgtttacttttttggtactataaaagctttctgccacccctaaactccaggggggamaatatgtgccaatcaatagcacccctactcacatacacacacacctagccagctgtcaagggcagaatgaatctatgctggataagaaatggtggaactg

SEQ ID NO: 2460 - DNA, 201 bp, Homo sapiens
agaaagaagttattttccaggtacccttctcgcttttgccattagccaaggatagaagctgcagtggtattaattttgatataatctttcaaaccagcttsatgtggcttcccttttctttgttcaagatgagggccaggaggggaaacatcacacctgccctaaaccctgttcctggaggtcagcatttgatctgttgca

SEQ ID NO: 2461 - DNA, 201 bp, Homo sapiens
gagaaggtatacactgaatatcctcgaagaaattggtggtggccagaaggtcaatgatgacattattgtcaactgggtgaatgaaacattgagggaagcaragaaaagttcatccatctctagtttcaaggacccgaagattagtacaagtctgcctgttctggacctcatcgatgccatccaaccaggttccattaacta

SEQ ID NO: 2462 - DNA, 201 bp, Homo sapiens
gtggtggccagaaggtcaatgatgacattattgtcaactgggtgaatgaaacattgagggaagcaaagaaaagttcatccatctctagtttcaaggaccckaagattagtacaagtctgcctgttctggacctcatcgatgccatccaaccaggttccattaactatgaccttctgaagacagaaaatctgaatgatgatg

SEQ ID NO: 2463 - DNA, 201 bp, Homo sapiens; identical to SEQ ID NO: 2453

SEQ ID NO: 2464 - DNA, 201 bp, Homo sapiens; identical to SEQ ID NO: 2454

SEQ ID NO: 2465 - DNA, 201 bp, Homo sapiens; identical to SEQ ID NO: 2455

SEQ ID NO: 2466 - DNA, 106 bp, Homo sapiens; identical to SEQ ID NO: 2456

SEQ ID NO: 2467 - DNA, 201 bp, Homo sapiens; identical to SEQ ID NO: 2457

SEQ ID NO: 2468 - DNA, 164 bp, Homo sapiens
ctttttctttcctggctgatgatttgtcattctagtcacttcctgccttgtgaccacacacccrggcttgacaaagctgttctgcagatcagaaagaaggggttcctggtcatacaccagtactaccaaggacagcttttttcctgcaagatctgttacctaaa

SEQ ID NO: 2469 - DNA, 201 bp, Homo sapiens; identical to SEQ ID NO: 2459

SEQ ID NO: 2470 - DNA, 201 bp, Homo sapiens; identical to SEQ ID NO: 2460

SEQ ID NO: 2471 - DNA, 201 bp, Homo sapiens; identical to SEQ ID NO: 2461

SEQ ID NO: 2472 - DNA, 201 bp, Homo sapiens; identical to SEQ ID NO: 2462

SEQ ID NO: 2473 - DNA, 201 bp, Homo sapiens
agcatcatatcttacaaaagttgaggaaatactgtatttccagcttaggaaactgaagattcctccggcctcagatgaccaggcaccactagatacagaayactgtgctttccttctccaagtcacttcctgccttgtgaccacacacccaggcttgacaaagctgttctgcagatcagaaagaaggggttcctggtcata

SEQ ID NO: 2474 - DNA, 201 bp, Homo sapiens
tgcgttatgaagagctaatttactggacaaagaattccaaagcaaaaccagaacagtatgaatttgagcaggtctcataggttgagcaatttccccctaaaccaactgaaggctaaaaagcaacaggccattgtgaaccatggtgaaaagctccatcaatgaggtatcttctttagtggtggtatgtaatggaacttagcc

SEQ ID NO: 2475 - DNA, 201 bp, Homo sapiens; identical to SEQ ID NO: 2454

SEQ ID NO: 2476 - DNA, 201 bp, Homo sapiens; identical to SEQ ID NO: 2455

SEQ ID NO: 2477 - DNA, 201 bp, Homo sapiens; identical to SEQ ID NO: 2457

SEQ ID NO: 2478 - DNA, 201 bp, Homo sapiens
aactgaagattcctccggcctcagatgaccaggcaccactagatacagaatactgtgctttccttctccaagtcacttcctgccttgtgaccacacacccrggcttgacaaagctgttctgcagatcagaaagaaggggttcctggtcatacaccagtactaccaaggacagcttttttcctgcaagatctgttacctaaa

SEQ ID NO: 2479 - DNA, 201 bp, Homo sapiens; identical to SEQ ID NO: 2459

SEQ ID NO: 2480 - DNA, 201 bp, Homo sapiens; identical to SEQ ID NO: 2460

SEQ ID NO: 2481 - DNA, 201 bp, Homo sapiens; identical to SEQ ID NO: 2461

SEQ ID NO: 2482 - DNA, 201 bp, Homo sapiens; identical to SEQ ID NO: 2462

SEQ ID NO: 2483 - DNA, 188 bp, Homo sapiens
agtcgccgctgggcaccccgagaccatggggaagctcgtggcgctggtcctgctgggggtcggcctgtccttagtcggggagatgttyctggcgtttagagaaagggtgaatgcctctcgagaagtggagccagtagaacctgaaaactgccaccttattgaggaacttgaaagtggctctgaagata

SEQ ID NO: 2484 - DNA, 201 bp, Homo sapiens
atgagggattaaaatatccaggcatgccaaactttgcgccagatgaaccaggaaaaatcttcttgatggatctgaatgaacaaaacccaagggcacaagcrctagaaatcagtggtggatttgacaaagaattatttaatccacatgggatcagtattttcatcgacaaagacaatactgtgtatctttatgttgtgaatc

SEQ ID NO: 2485 - DNA, 201 bp, Homo sapiens
aaaacccaagggcacaagcactagaaatcagtggtggatttgacaaagaattatttaatccacatgggatcagtattttcatcgacaaagacaatactgtrtatctttatgttgtgaatcatccccacatgaagtccactgtggagatatttaaatttgaggaacaacaacgttctctggtatacctgaaaactataaaac

SEQ ID NO: 2486 - DNA, 201 bp, Homo sapiens
gaggaacaacaacgttctctggtatacctgaaaactataaaacatgaacttctcaaaagtgtgaatgacattgtggttcttggaccagaacagttctatgmcaccagagaccactattttaccaactccctcctgtcattttttgagatgatcttggatcttcgctggacttatgttcttttctacagcccaagggaggtt

SEQ ID NO: 2487 - DNA, 201 bp, Homo sapiens
aggagcaaaatgggacttttggctgaaagtgctgagctcctgcggtgggggctgaccgcaagccacgccttctgtgcacctggtcggcccagctagctgcsgacccggcggggaggggcggggcgggccaatcggcgctgccccagcagggctgcggctgcaggcaggcagagcctcctagcccgtcggtgtctgcgccca

SEQ ID NO: 2488 - DNA, 201 bp, Homo sapiens
ttggctgaaagtgctgagctcctgcggtgggggctgaccgcaagccacgccttctgtgcacctggtcggcccagctagctgcggacccggcggggaggggyggggcgggccaatcggcgctgccccagcagggctgcggctgcaggcaggcagagcctcctagcccgtcggtgtctgcgcccatcgatccctttgtctatc

SEQ ID NO: 2489 - DNA, 201 bp, Homo sapiens
gagcttcaaccccaacagtcctggaaaaatacttctgatggacctgaatgaagaagatccaacagtgttggaattggggatcactggaagtaaatttgatrtatcttcatttaaccctcatgggattagcacattcacagatgaagataatgccatgtacctcctggtggtgaaccatccagatgccaagtccacagtgga

SEQ ID NO: 2490 - DNA, 201 bp, Homo sapiens
aggtaaacaaacaaataaatagaaaagatcaacaacccctttggctatctactgagacatgactaggaagaaaacatgactttatcattttgttatagaarctgatatataaaggttacacattttcatttatttgtttttctgatttgaaggtataaccttcatgatgaattacttcttcagggtgttaaggcagtgact

SEQ ID NO: 2491 - DNA, 201 bp, Homo sapiens
gtcttcttaccaaacacgacttaatgctctccgagaggtacaacccgtagaacttcctaactgtaatttagttaaaggaatcgaaactggctctgaagacwtggagatactgcctaatggactggctttcattagctctggattaaagtatcctggaataaagagcttcaaccccaacagtcctggaaaaatacttctgat

SEQ ID NO: 2492 - DNA, 201 bp, Homo sapiens
atcagacataaacttctgcctaatttgaatgatattgttgctgtgggacctgagcacttttatggcacaaatgatcactattttcttgacccctacttacratcctgggagatgtatttgggtttagcgtggtcgtatgttgtctactatagtccaagtgaagttcgagtggtggcagaaggatttgattttgctaatgga

SEQ ID NO: 2493 - DNA, 170 bp, Homo sapiens
ttggaaggagcaaaatgggacttttggctgaaagtgctgagctcctgcggtgggggctgaccgcaagccrcgccttctgtgcacctggtcggcccagctagctgcggacccggcggggaggggcggggcgggccaatcggcgctgccccagcagggctgcggctgcaggc

SEQ ID NO: 2494 - DNA, 201 bp, Homo sapiens; identical to SEQ ID NO: 2489

SEQ ID NO: 2495 - DNA, 201 bp, Homo sapiens; identical to SEQ ID NO: 2490

SEQ ID NO: 2496 - DNA, 201 bp, Homo sapiens
tcatcgacaaagaacacgacttaatgctctccgagaggtacaacccgtagaacttcctaactgtaatttagttaaaggaatcgaaactggctctgaagacwtggagatactgcctaatggactggctttcattagctctggattaaagtatcctggaataaagagcttcaaccccaacagtcctggaaaaatacttctgat

SEQ ID NO: 2497 - DNA, 201 bp, Homo sapiens
atgagggattaaaatatccaggcatgccaaactttgcgccagatgaaccaggaaaaatcttcttgatggatctgaatgaacaaaacccaagggcacaagcrctagaaatcagtggtggatttgacaaagaattatttaatccacatgggatcagtattttcatcgacaaagaacacgacttaatgctctccgagaggtaca

SEQ ID NO: 2498 - DNA, 201 bp, Homo sapiens; identical to SEQ ID NO: 2492

SEQ ID NO: 2499 - DNA, 188 bp, Homo sapiens; identical to SEQ ID NO: 2483

SEQ ID NO: 2500 - DNA, 201 bp, Homo sapiens
ccagtggattaaaatatccaggcatgccaaactttgcgccagatgaaccaggaaaaatcttcttgatggatctgaatgaacaaaacccaagggcacaagcrctagaaatcagtggtggatttgacaaagaattatttaatccacatgggatcagtattttcatcgacaaagacaatactgtgtatctttatgttgtgaatc

SEQ ID NO: 2501 - DNA, 201 bp, Homo sapiens; identical to SEQ ID NO: 2485

SEQ ID NO: 2502 - DNA, 201 bp, Homo sapiens; identical to SEQ ID NO: 2486

SEQ ID NO: 2503 - DNA, 201 bp, Homo sapiens; identical to SEQ ID NO: 2487

SEQ ID NO: 2504 - DNA, 201 bp, Homo sapiens; identical to SEQ ID NO: 2488

SEQ ID NO: 2505 - DNA, 201 bp, Homo sapiens; identical to SEQ ID NO: 2489

SEQ ID NO: 2506 - DNA, 201 bp, Homo sapiens; identical to SEQ ID NO: 2490

SEQ ID NO: 2507 - DNA, 201 bp, Homo sapiens; identical to SEQ ID NO: 2491

SEQ ID NO: 2508 - DNA, 201 bp, Homo sapiens; identical to SEQ ID NO: 2492

SEQ ID NO: 2509 - DNA, 201 bp, Homo sapiens
ttcatcccagaggggcatccgcctgtatgagttggaaggagcaaaatgggacttttggctgaaagtgctgagctcctgcggtgggggctgaccgcaagccrcgccttctgtgcacctggtcggcccagctagctgcggacccggcggggaggggcggggcgggccaatcggcgctgccccagcagggctgcggctgcaggc

SEQ ID NO: 2510 - DNA, 201 bp, Homo sapiens
accaccttccccggtagcagaattctcagaagccaccgctgaactgaccgtctcattcacaaacgaagtcttcacaactgagacttctaggagtatcaccrccagtccaaaggagtcagactctccagctggtcctgcccgccagtactacaccaagggcaacctggtccggatatgcctcggggctgtgatcctaataat

SEQ ID NO: 2511 - DNA, 201 bp, Homo sapiens
cttctaggagtatcaccaccagtccaaaggagtcagactctccagctggtcctgcccgccagtactacaccaagggcaacctggtccggatatgcctcggrgctgtgatcctaataatcctggcggggtttctggcagaggactggcacagccggaggaagcgcctgcggcacaggggcagggctgtgcagaggccgcttc

SEQ ID NO: 2512 - DNA, 201 bp, Homo sapiens
aggaacctctgtgacccccagccggttaccaacagaaccaccttccccggtagcagaattctcagaagccaccgctgaactgaccgtctcattcacaaacraagtcttcacaactgagacttctaggagtatcaccaccagtccaaaggagtcagactctccagctggtcctgcccgccagtactacaccaagggcaacct

SEQ ID NO: 2513 - DNA, 201 bp, Homo sapiens
aaaaatacagggatgaatatgtcaattaccctgatttgatcatagcacgttgtatacatgtactgcaatattgctgtccaccccataaatatgtacaattmtgtatacatttttaaaatcataaaaataagataatgcaccgtctccacccctctcatatttactttctgaaggaaatgttaggtcttctcaaggtaaagt

SEQ ID NO: 2514 - DNA, 201 bp, Homo sapiens
cggggggctgaggtgggagaatggcttgagcctgggaggcagaggttgcagtgagctgagatcacaccactgcactctagctcgggtgacgaagcctgacyttgtctcaaaaaatacagggatgaatatgtcaattaccctgatttgatcatagcacgttgtatacatgtactgcaatattgctgtccaccccataaatat

SEQ ID NO: 2515 - DNA, 201 bp, Homo sapiens
ggacgtaaccctacagtgtcagactcggtatggctttgaccaatttgctctgtacaaggaaggggaccctgcgccctacaagaatcccgagagatggtacmgggctagtttccccatcatcacggtgaccgccgcccacagcggaacctaccgatgctacagcttctccagcagggacccatacctgtggtcggcccccag

SEQ ID NO: 2516 - DNA, 201 bp, Homo sapiens
cagcctgtgcaacatggtgaaacctcatctctaccaacaaaacaaaaaaacacaaaaattagccaggtgtggtggtgcatccctatactcccagcaactcrgggggctgaggtgggagaatggcttgagcctgggaggcagaggttgcagtgagctgagatcacaccactgcactctagctcgggtgacgaagcctgacct

SEQ ID NO: 2517 - DNA, 201 bp, Homo sapiens
gatggtaccgggctagtttccccatcatcacggtgaccgccgcccacagcggaacctaccgatgctacagcttctccagcagggacccatacctgtggtcrgcccccagcgaccccctggagcttgtggtcacaggaacctctgtgacccccagccggttaccaacagaaccaccttccccggtagcagaattctcagaag

SEQ ID NO: 2518 - DNA, 201 bp, Homo sapiens
  misc_feature (1)...(201): n = A,T,C or G, or insertion/deletion polymorphism (see Tables 1-2)
tacagtgtcagactcggtatggctttgaccaatttgctctgtacaaggaaggggaccctgcgccctacaagaatcccgagagatggtaccgggctagtttncccatcatcacggtgaccgccgcccacagcggaacctaccgatgctacagcttctccagcagggacccatacctgtggtcggcccccagcgaccccctgg

SEQ ID NO: 2519 - DNA, 201 bp, Homo sapiens
ggcctctttcttcaacctctctaatatgggctccagacggatctctaaggttcccagctctcagggttgactctgttccatcctctgtgcaaaatcctccygtgcttccctttggccctctgtgctcttgtctggttttccccagaaactctcaccctcactccatctcccactgcggtctaacaaatctcctttcgtctc

SEQ ID NO: 2520 - DNA, 201 bp, Homo sapiens
tcccagcaactcggggggctgaggtgggagaatggcttgagcctgggaggcagaggttgcagtgagctgagatcacaccactgcactctagctcgggtgaygaagcctgaccttgtctcaaaaaatacagggatgaatatgtcaattaccctgatttgatcatagcacgttgtatacatgtactgcaatattgctgtccac

SEQ ID NO: 2521 - DNA, 201 bp, Homo sapiens
agaggactggcacagccggaggaagcgcctgcggcacaggggcagggctgtgcagaggccgcttccgcccctcccgcccctcccgcagacccggaaatcahacgggggtcaggatggaggccgacaggatgttcacagccgcgggttatgttcatgaccgctgaaccccaggcacggtcgtatccaagggagggatcatgg

SEQ ID NO: 2522 - DNA, 201 bp, Homo sapiens
gcggggtttctggcagaggactggcacagccggaggaagcgcctgcggcacaggggcagggctgtgcagaggccgcttccgcccctcccgcccctcccgcwgacccggaaatcacacgggggtcaggatggaggccgacaggatgttcacagccgcgggttatgttcatgaccgctgaaccccaggcacggtcgtatccaa

SEQ ID NO: 2523 - DNA, 201 bp, Homo sapiens
cagggacccatacctgtggtcggcccccagcgaccccctggagcttgtggtcacaggaacctctgtgacccccagccggttaccaacagaaccaccttccycggtagcagaattctcagaagccaccgctgaactgaccgtctcattcacaaacgaagtcttcacaactgagacttctaggagtatcaccaccagtccaaa

SEQ ID NO: 2524 - DNA, 201 bp, Homo sapiens
tcctaataatcctggcggggtttctggcagaggactggcacagccggaggaagcgcctgcggcacaggggcagggctgtgcagaggccgcttccgcccctsccgcccctcccgcagacccggaaatcacacgggggtcaggatggaggccgacaggatgttcacagccgcgggttatgttcatgaccgctgaaccccaggc

SEQ ID NO: 2525 - DNA, 201 bp, Homo sapiens
ctcggtatggctttgaccaatttgctctgtacaaggaaggggaccctgcgccctacaagaatcccgagagatggtaccgggctagtttccccatcatcacrgtgaccgccgcccacagcggaacctaccgatgctacagcttctccagcagggacccatacctgtggtcggcccccagcgaccccctggagcttgtggtca

SEQ ID NO: 2526 - DNA, 201 bp, Homo sapiens
cctggagcttgtggtcacagaattctcagaagccaccgctgaactgaccgtctcattcacaaacgaagtcttcacaactgagacttctaggagtatcaccrccagtccaaaggagtcagactctccagctggtcctgcccgccagtactacaccaagggcaacctggtccggatatgcctcggggctgtgatcctaataat

SEQ ID NO: 2527 - DNA, 201 bp, Homo sapiens; identical to SEQ ID NO: 2511

SEQ ID NO: 2528 - DNA, 201 bp, Homo sapiens
cagggacccatacctgtggtcggcccccagcgaccccctggagcttgtggtcacagaattctcagaagccaccgctgaactgaccgtctcattcacaaacraagtcttcacaactgagacttctaggagtatcaccaccagtccaaaggagtcagactctccagctggtcctgcccgccagtactacaccaagggcaacct

SEQ ID NO: 2529 - DNA, 201 bp, Homo sapiens; identical to SEQ ID NO: 2513

SEQ ID NO: 2530 - DNA, 201 bp, Homo sapiens; identical to SEQ ID NO: 2515

SEQ ID NO: 2531 - DNA, 201 bp, Homo sapiens; identical to SEQ ID NO: 2514

SEQ ID NO: 2532 - DNA, 201 bp, Homo sapiens
gatggtaccgggctagtttccccatcatcacggtgaccgccgcccacagcggaacctaccgatgctacagcttctccagcagggacccatacctgtggtcrgcccccagcgaccccctggagcttgtggtcacagaattctcagaagccaccgctgaactgaccgtctcattcacaaacgaagtcttcacaactgagactt

SEQ ID NO: 2533 - DNA, 201 bp, Homo sapiens; identical to SEQ ID NO: 2518
  misc_feature (1)...(201): n = A,T,C or G, or insertion/deletion polymorphism (see Tables 1-2)

SEQ ID NO: 2534 - DNA, 201 bp, Homo sapiens; identical to SEQ ID NO: 2516

SEQ ID NO: 2535 - DNA, 201 bp, Homo sapiens; identical to SEQ ID NO: 2519

SEQ ID NO: 2536 - DNA, 201 bp, Homo sapiens; identical to SEQ ID NO: 2520

SEQ ID NO: 2537 - DNA, 201 bp, Homo sapiens; identical to SEQ ID NO: 2521

SEQ ID NO: 2538 - DNA, 201 bp, Homo sapiens; identical to SEQ ID NO: 2522

SEQ ID NO: 2539 - DNA, 201 bp, Homo sapiens; identical to SEQ ID NO: 2525

SEQ ID NO: 2540 - DNA, 201 bp, Homo sapiens; identical to SEQ ID NO: 2524

SEQ ID NO: 2541 - DNA, 201 bp, Homo sapiens
accaccttccccggtagcagaattctcagaagccaccgctgaactgaccgtctcattcacaaacgaagtcttcacaactgagacttctaggagtatcaccrccagtccaaaggagtcagactctccagctggtgagtcctgcccgccagtactacaccaagggcaacctggtccggatatgcctcggggctgtgatcctaa

SEQ ID NO: 2542 - DNA, 201 bp, Homo sapiens
taggagtatcaccaccagtccaaaggagtcagactctccagctggtgagtcctgcccgccagtactacaccaagggcaacctggtccggatatgcctcggrgctgtgatcctaataatcctggcggggtttctggcagaggactggcacagccggaggaagcgcctgcggcacaggggcagggctgtgcagaggccgcttc

SEQ ID NO: 2543 - DNA, 201 bp, Homo sapiens
aggaacctctgtgacccccagccggttaccaacagaaccaccttccccggtagcagaattctcagaagccaccgctgaactgaccgtctcattcacaaacraagtcttcacaactgagacttctaggagtatcaccaccagtccaaaggagtcagactctccagctggtgagtcctgcccgccagtactacaccaagggca

SEQ ID NO: 2544 - DNA, 201 bp, Homo sapiens; identical to SEQ ID NO: 2513

SEQ ID NO: 2545 - DNA, 201 bp, Homo sapiens; identical to SEQ ID NO: 2515

SEQ ID NO: 2546 - DNA, 201 bp, Homo sapiens; identical to SEQ ID NO: 2514

SEQ ID NO: 2547 - DNA, 201 bp, Homo sapiens; identical to SEQ ID NO: 2517

SEQ ID NO: 2548 - DNA, 201 bp, Homo sapiens; identical to SEQ ID NO: 2518
  misc_feature (1)...(201): n = A,T,C or G, or insertion/deletion polymorphism (see Tables 1-2)

SEQ ID NO: 2549 - DNA, 201 bp, Homo sapiens; identical to SEQ ID NO: 2516

SEQ ID NO: 2550 - DNA, 201 bp, Homo sapiens; identical to SEQ ID NO: 2519

SEQ ID NO: 2551 - DNA, 201 bp, Homo sapiens; identical to SEQ ID NO: 2520

SEQ ID NO: 2552 - DNA, 201 bp, Homo sapiens; identical to SEQ ID NO: 2521

SEQ ID NO: 2553 - DNA, 201 bp, Homo sapiens; identical to SEQ ID NO: 2522

SEQ ID NO: 2554 - DNA, 201 bp, Homo sapiens; identical to SEQ ID NO: 2523

SEQ ID NO: 2555 - DNA, 201 bp, Homo sapiens; identical to SEQ ID NO: 2525

SEQ ID NO: 2556 - DNA, 201 bp, Homo sapiens; identical to SEQ ID NO: 2524

SEQ ID NO: 2557 - DNA, 201 bp, Homo sapiens
gcacggtagcaggcgccgccgtgctgctcaaggactatgtcaccggtggggcttgccccagcaaggccaccatccctgggaagacggtcatcgtgacgggygccaacacaggcatcgggaagcagaccgccttggaactggccaggagaggaggcaacatcatcctggcctgccgagacatggagaagtgtgaggcggcag

SEQ ID NO: 2558 - DNA, 201 bp, Homo sapiens
cccgcgccccgcccctcgcagcccagttccggacgcgggcccagccgcgcctgcgcttccgctcgcctgtggctgcgtcgcgcgctcttcctcggagctayccaggcggctggtgtgcagcaagctccgcgccgaccccggacgcctgacgcctgacgcctgctacccggcccggcatgagccgctacctgctgccgctgt

SEQ ID NO: 2559 - DNA, 201 bp, Homo sapiens
tctcgtccctggcccatgttgctgggcacatagactttgacgacttgaactggcagacgaggaagtataacaccaaagccgcctactgccagagcaagctygccatcgtcctcttcaccaaggagctgagccggcggctgcaaggctctggtgtgactgtcaacgccctgcaccccggcgtggccaggacagagctgggca

SEQ ID NO: 2560 - DNA, 201 bp, Homo sapiens
gcctgtggctgcgtcgcgcgctcttcctcggagctacccaggcggctggtgtgcagcaagctccgcgccgaccccggacgcctgacgcctgacgcctgctmcccggcccggcatgagccgctacctgctgccgctgtcggcgctgggcacggtagcaggcgccgccgtgctgctcaaggactatgtcaccggtggggcttg

SEQ ID NO: 2561 - DNA, 201 bp, Homo sapiens
gcacatagactttgacgacttgaactggcagacgaggaagtataacaccaaagccgcctactgccagagcaagctcgccatcgtcctcttcaccaaggagytgagccggcggctgcaaggctctggtgtgactgtcaacgccctgcaccccggcgtggccaggacagagctgggcagacacacgggcatccatggctccac

SEQ ID NO: 2562 - DNA, 201 bp, Homo sapiens
ccccggcccccgaggctgaggatgaggaggtggcccggaggctttgggctgaaagtgcccgcctggtgggcttagaggctccctctgtgagggagcagccmctccccagataacctctggagcagatttgaaagccaggatggcgcctccagaccgaggacagctgtccgccatgcccgcagcttcctggcactacctgag

SEQ ID NO: 2563 - DNA, 201 bp, Homo sapiens
cctgagccgggagacccaggactggcggccgccatgcccgcagtaggttctagggggcggtgctggccgcagtggactggcctgcaggtgagcactgcccygggctctggctggttccgtctgctctgctgccagcaggggagaggggccatctgatgcttcccctgggaatctaaactgggaatggccgaggaggaaggg

SEQ ID NO: 2564 - DNA, 201 bp, Homo sapiens
cagcgagctgttgtctggctatggcatggctgtgccgggggtgtttgctgagggcttcctgtgccagagcccagccagagagcaggtgcaggtgtcatccygagttcaggctctgcacggcatggagtgggaaccccaccagctgctgctacaggacctgggattgcctgggactcccaccttcctatcaattctcatggt

SEQ ID NO: 2565 - DNA, 201 bp, Homo sapiens
accgatgctcataggtcccgtccctaggatccccgccccctccgcccgcgccccgcccctcgcagcccagttccggacgcgggcccagccgcgcctgcgcytccgctcgcctgtggctgcgtcgcgcgctcttcctcggagctacccaggcggctggtgtgcagcaagctccgcgccgaccccggacgcctgacgcctgac

SEQ ID NO: 2566 - DNA, 201 bp, Homo sapiens
tctggctggttccgtctgctctgctgccagcaggggagaggggccatctgatgcttcccctgggaatctaaactgggaatggccgaggaggaaggggctcygtgcacttgcaggccacgtcaggagagccagcggtgcctgtcggggagggttccaaggtgctccgtgaagagcatgggcaagttgtctgacacttggtgg

SEQ ID NO: 2567 - DNA, 201 bp, Homo sapiens
tgaagagcatgggcaagttgtctgacacttggtggattcttgggtccctgtgggaccttgtgcatgcatggtcctctctgagccttggtttcttcagcagygagatgctcagaataactgctgtctcccatgatggtgtggtacagcgagctgttgtctggctatggcatggctgtgccgggggtgtttgctgagggcttc

SEQ ID NO: 2568 - DNA, 201 bp, Homo sapiens
caggagaggaggcaacatcatcctggcctgccgagacatggagaagtgtgaggcggcagcaaaggacatccgcggggagaccctcaatcaccatgtcaacrcccggcacctggacttggcttccctcaagtctatccgagagtttgcagcaaagatcattgaagaggaggagcgagtggacattctaatcaacaacgcggg

SEQ ID NO: 2569 - DNA, 201 bp, Homo sapiens
ccaggagaggaggcaacatcatcctggcctgccgagacatggagaagtgtgaggcggcagcaaaggacatccgcggggagaccctcaatcaccatgtcaamgcccggcacctggacttggcttccctcaagtctatccgagagtttgcagcaaagatcattgaagaggaggagcgagtggacattctaatcaacaacgcgg

SEQ ID NO: 2570 - DNA, 201 bp, Homo sapiens
tcatcggcgaatttcactctgtcgccaggctggaatgcagtagggcaatctcggctcactgcaacctccacctcccgagttcaagtgatgctcctgcttcrgcctcctgagtagctgggactacagaactgcgtagcgccttatacgctgcggcaagtgtgacgtcattcgaacaaaccataggccccgcccccggactag

SEQ ID NO: 2571 - DNA, 201 bp, Homo sapiens
cccagccgcgcctgcgcttccgctcgcctgtggctgcgtcgcgcgctcttcctcggagctacccaggcggctggtgtgcagcaagctccgcgccgacccckgacgcctgacgcctgacgcctgctacccggcccggcatgagccgctacctgctgccgctgtcggcgctgggcacggtagcaggcgccgccgtgctgctca

SEQ ID NO: 2572 - DNA, 201 bp, Homo sapiens
tgcgtcgcgcgctcttcctcggagctacccaggcggctggtgtgcagcaagctccgcgccgaccccggacgcctgacgcctgacgcctgctacccggcccsgcatgagccgctacctgctgccgctgtcggcgctgggcacggtagcaggcgccgccgtgctgctcaaggactatgtcaccggtggggcttgccccagcaa

SEQ ID NO: 2573 - DNA, 201 bp, Homo sapiens
gcttcggcctcctgagtagctgggactacagggactatgtcaccggtggggcttgccccagcaaggccaccatccctgggaagacggtcatcgtgacgggygccaacacaggcatcgggaagcagaccgccttggaactggccaggagaggaggcaacatcatcctggcctgccgagacatggagaagtgtgaggcggcag

SEQ ID NO: 2574 - DNA, 201 bp, Homo sapiens; identical to SEQ ID NO: 2559

SEQ ID NO: 2575 - DNA, 201 bp, Homo sapiens; identical to SEQ ID NO: 2567

SEQ ID NO: 2576 - DNA, 201 bp, Homo sapiens; identical to SEQ ID NO: 2566

SEQ ID NO: 2577 - DNA, 201 bp, Homo sapiens; identical to SEQ ID NO: 2568

SEQ ID NO: 2578 - DNA, 201 bp, Homo sapiens; identical to SEQ ID NO: 2569

SEQ ID NO: 2579 - DNA, 201 bp, Homo sapiens; identical to SEQ ID NO: 2561

SEQ ID NO: 2580 - DNA, 201 bp, Homo sapiens
ggggttcggaatttcactctgtcgccaggctggaatgcagtagggcaatctcggctcactgcaacctccacctcccgagttcaagtgatgctcctgcttcrgcctcctgagtagctgggactacagggactatgtcaccggtggggcttgccccagcaaggccaccatccctgggaagacggtcatcgtgacgggcgccaa

SEQ ID NO: 2581 - DNA, 201 bp, Homo sapiens; identical to SEQ ID NO: 2562

SEQ ID NO: 2582 - DNA, 201 bp, Homo sapiens; identical to SEQ ID NO: 2563

SEQ ID NO: 2583 - DNA, 201 bp, Homo sapiens; identical to SEQ ID NO: 2564

SEQ ID NO: 2584 - DNA, 201 bp, Homo sapiens; identical to SEQ ID NO: 2557

SEQ ID NO: 2585 - DNA, 201 bp, Homo sapiens; identical to SEQ ID NO: 2558

SEQ ID NO: 2586 - DNA, 201 bp, Homo sapiens; identical to SEQ ID NO: 2559

SEQ ID NO: 2587 - DNA, 201 bp, Homo sapiens; identical to SEQ ID NO: 2560

SEQ ID NO: 2588 - DNA, 201 bp, Homo sapiens; identical to SEQ ID NO: 2561

SEQ ID NO: 2589 - DNA, 201 bp, Homo sapiens; identical to SEQ ID NO: 2562

SEQ ID NO: 2590 - DNA, 201 bp, Homo sapiens; identical to SEQ ID NO: 2563

SEQ ID NO: 2591 - DNA, 201 bp, Homo sapiens; identical to SEQ ID NO: 2564

SEQ ID NO: 2592 - DNA, 201 bp, Homo sapiens; identical to SEQ ID NO: 2565

SEQ ID NO: 2593 - DNA, 201 bp, Homo sapiens; identical to SEQ ID NO: 2566

SEQ ID NO: 2594 - DNA, 201 bp, Homo sapiens; identical to SEQ ID NO: 2567

SEQ ID NO: 2595 - DNA, 201 bp, Homo sapiens; identical to SEQ ID NO: 2568

SEQ ID NO: 2596 - DNA, 201 bp, Homo sapiens; identical to SEQ ID NO: 2569

SEQ ID NO: 2597 - DNA, 201 bp, Homo sapiens
ggggttcggaatttcactctgtcgccaggctggaatgcagtagggcaatctcggctcactgcaacctccacctcccgagttcaagtgatgctcctgcttcrgcctcctgagtagctgggactacagaactgcgtagcgccttatacgctgcggcaagtgtgacgtcattcgaacaaaccataggccccgcccccggactag

SEQ ID NO: 2598 - DNA, 201 bp, Homo sapiens; identical to SEQ ID NO: 2571

SEQ ID NO: 2599 - DNA, 201 bp, Homo sapiens; identical to SEQ ID NO: 2572

SEQ ID NO: 2600 - DNA, 201 bp, Homo sapiens; identical to SEQ ID NO: 2573

SEQ ID NO: 2601 - DNA, 201 bp, Homo sapiens; identical to SEQ ID NO: 2559

SEQ ID NO: 2602 - DNA, 201 bp, Homo sapiens; identical to SEQ ID NO: 2567

SEQ ID NO: 2603 - DNA, 201 bp, Homo sapiens; identical to SEQ ID NO: 2566

SEQ ID NO: 2604 - DNA, 201 bp, Homo sapiens; identical to SEQ ID NO: 2568

SEQ ID NO: 2605 - DNA, 201 bp, Homo sapiens; identical to SEQ ID NO: 2569

SEQ ID NO: 2606 - DNA, 201 bp, Homo sapiens; identical to SEQ ID NO: 2561

SEQ ID NO: 2607 - DNA, 201 bp, Homo sapiens; identical to SEQ ID NO: 2580

SEQ ID NO: 2608 - DNA, 201 bp, Homo sapiens; identical to SEQ ID NO: 2562

SEQ ID NO: 2609 - DNA, 201 bp, Homo sapiens; identical to SEQ ID NO: 2563

SEQ ID NO: 2610 - DNA, 201 bp, Homo sapiens; identical to SEQ ID NO: 2564

SEQ ID NO: 2611 - DNA, 201 bp, Homo sapiens; identical to SEQ ID NO: 2557

SEQ ID NO: 2612 - DNA, 201 bp, Homo sapiens; identical to SEQ ID NO: 2558

SEQ ID NO: 2613 - DNA, 201 bp, Homo sapiens; identical to SEQ ID NO: 2559

SEQ ID NO: 2614 - DNA, 201 bp, Homo sapiens; identical to SEQ ID NO: 2560

SEQ ID NO: 2615 - DNA, 201 bp, Homo sapiens; identical to SEQ ID NO: 2561

SEQ ID NO: 2616 - DNA, 201 bp, Homo sapiens; identical to SEQ ID NO: 2562

SEQ ID NO: 2617 - DNA, 201 bp, Homo sapiens; identical to SEQ ID NO: 2563

SEQ ID NO: 2618 - DNA, 201 bp, Homo sapiens; identical to SEQ ID NO: 2564

SEQ ID NO: 2619 - DNA, 201 bp, Homo sapiens; identical to SEQ ID NO: 2565

SEQ ID NO: 2620 - DNA, 201 bp, Homo sapiens; identical to SEQ ID NO: 2566

SEQ ID NO: 2621 - DNA, 201 bp, Homo sapiens; identical to SEQ ID NO: 2567

SEQ ID NO: 2622 - DNA, 201 bp, Homo sapiens; identical to SEQ ID NO: 2568

SEQ ID NO: 2623 - DNA, 201 bp, Homo sapiens; identical to SEQ ID NO: 2569

SEQ ID NO: 2624 - DNA, 201 bp, Homo sapiens; identical to SEQ ID NO: 2570

SEQ ID NO: 2625 - DNA, 201 bp, Homo sapiens; identical to SEQ ID NO: 2571

SEQ ID NO: 2626 - DNA, 201 bp, Homo sapiens; identical to SEQ ID NO: 2572

SEQ ID NO: 2627 - DNA, 201 bp, Homo sapiens
gaattcacctgcagggcattccaatatcacagtaaagagcaacaatgtgtgataatggctgaaaacaggaagtcctccataatcattaggatgagagatgyagttttatttgaaaagaaagtgtatctctcagagtgcaagactgggaatggaaagaactacagagggacgatgtccaaaacaaaaaatggcatcacctgt

SEQ ID NO: 2628 - DNA, 201 bp, Homo sapiens
gggacgccatgccaggactgggctgcccaggagccccatagacacagcattttcactccagagacaaatccacgggcgggtctggaaaaaaattactgccrtaaccctgatggtgatgtaggtggtccctggtgctacacgacaaatccaagaaaactttacgactactgtgatgtccctcagtgtgcggccccttcattt

SEQ ID NO: 2629 - DNA, 201 bp, Homo sapiens
ggcccacccacattcctggccctggcaagtcagtcttagaacaaggtttggaatgcacttctgtggaggcaccttgatatccccagagtgggtgttgactrctgcccactgcttggagaagtccccaaggccttcatcctacaaggtcatcctgggtgcacaccaagaagtgaatctcgaaccgcatgttcaggaaataga

SEQ ID NO: 2630 - DNA, 201 bp, Homo sapiens
agggtgacagtggagggcctctggtttgcttcgagaaggacaaatacattttacaaggagtcacttcttggggtcttggctgtgcacgccccaataagccyggtgtctatgttcgtgtttcaaggtttgttacttggattgagggagtgatgagaaataattaattggacgggagacagagtgacgcactgactcacctag

SEQ ID NO: 2631 - DNA, 201 bp, Homo sapiens
aaaactatcgcgggaatgtggctgttaccgtgtccgggcacacctgtcagcactggagtgcacagacccctcacacacataacaggacaccagaaaacttyccctgcaaaaatttggatgaaaactactgccgcaatcctgacggaaaaagggccccatggtgccatacaaccaacagccaagtgcggtgggagtactgta

SEQ ID NO: 2632 - DNA, 201 bp, Homo sapiens
cctcatcagctaacgagggcttgacatgcatttttactgtctttattcctgacactgagatgaatgttttcaaagctgcaacatgcatggggagtcatgcraaccgattctgttattgggaatgaaatctgtcaccgactgcttgacttgagcccaggggacacagagcagagagctgtatatgatggagtgaaccggtcc

SEQ ID NO: 2633 - DNA, 201 bp, Homo sapiens
cagagtgggtgttgactgctgcccactgcttggagaagtccccaaggccttcatcctacaaggtcatcctgggtgcacaccaagaagtgaatctcgaaccrcatgttcaggaaatagaagtgtctaggctgttcttggagcccacacgaaaagatattgccttgctaaagctaagcagtcctgccgtcatcactgacaaag

SEQ ID NO: 2634 - DNA, 201 bp, Homo sapiens
gaagaatgtgcagcaaaatgtgaggaggacgaagaattcacctgcagggcattccaatatcacagtaaagagcaacaatgtgtgataatggctgaaaacargaagtcctccataatcattaggatgagagatgtagttttatttgaaaagaaagtgtatctctcagagtgcaagactgggaatggaaagaactacagaggg

SEQ ID NO: 2635 - DNA, 201 bp, Homo sapiens
ggcctgacaatgaactactgcaggaatccagatgccgataaaggcccctggtgttttaccacagaccccagcgtcaggtgggagtactgcaacctgaaaawatgctcaggaacagaagcgagtgttgtagcacctccgcctgttgtcctgcttccagatgtagagactccttccgaagaagactgtatgtttgggaatggg

SEQ ID NO: 2636 - DNA, 201 bp, Homo sapiens
agcagctgggagcaggaagtatagaagaatgtgcagcaaaatgtgaggaggacgaagaattcacctgcagggcattccaatatcacagtaaagagcaacartgtgtgataatggctgaaaacaggaagtcctccataatcattaggatgagagatgtagttttatttgaaaagaaagtgtatctctcagagtgcaagactg

SEQ ID NO: 2637 - DNA, 201 bp, Homo sapiens
taccacagaccccagcgtcaggtgggagtactgcaacctgaaaaaatgctcaggaacagaagcgagtgttgtagcacctccgcctgttgtcctgcttccaratgtagagactccttccgaagaagactgtatgtttgggaatgggaaaggataccgaggcaagagggcgaccactgttactgggacgccatgccaggactg

SEQ ID NO: 2638 - DNA, 201 bp, Homo sapiens
ctgaaaacaggaagtcctccataatcattaggatgagagatgtagttttatttgaaaagaaagtgtatctctcagagtgcaagactgggaatggaaagaaytacagagggacgatgtccaaaacaaaaaatggcatcacctgtcaaaaatggagttccacttctccccacagacctagattctcacctgctacacacccct

SEQ ID NO: 2639 - DNA, 201 bp, Homo sapiens
cacacgaaaagatattgccttgctaaagctaagcagtcctgccgtcatcactgacaaagtaatcccagcttgtctgccatccccaaattatgtggtcgctraccggaccgaatgtttcatcactggctggggagaaacccaaggtacttttggagctggccttctcaaggaagcccagctccctgtgattgagaataaagt

SEQ ID NO: 2640 - DNA, 201 bp, Homo sapiens
tttctgaaatcaggtcaaggagagcctctggatgactatgtgaatacccagggggcttcactgttcagtgtcactaagaagcagctgggagcaggaagtakagaagaatgtgcagcaaaatgtgaggaggacgaagaattcacctgcagggcattccaatatcacagtaaagagcaacaatgtgtgataatggctgaaaac

SEQ ID NO: 2641 - DNA, 201 bp, Homo sapiens
tatttctgaaatcaggtcaaggagagcctctggatgactatgtgaatacccagggggcttcactgttcagtgtcactaagaagcagctgggagcaggaagyatagaagaatgtgcagcaaaatgtgaggaggacgaagaattcacctgcagggcattccaatatcacagtaaagagcaacaatgtgtgataatggctgaaa

SEQ ID NO: 2642 - DNA, 201 bp, Homo sapiens
cagtcccaaaatggaacataaggaagtggttcttctacttcttttatttctgaaatcaggtcaaggagagcctctggatgactatgtgaatacccaggggscttcactgttcagtgtcactaagaagcagctgggagcaggaagtatagaagaatgtgcagcaaaatgtgaggaggacgaagaattcacctgcagggcatt

SEQ ID NO: 2643 - DNA, 155 bp, Homo sapiens
ggtttgtggatgcgtttactctcatgtaagtcaacaacatcctgggattgggacmcactttctgggcactgctggccagtcccaaaatggaacataaggaagtggttcttctacttcttttatttctgaaatcaggtcaaggagagcctctggat

SEQ ID NO: 2644 - DNA, 201 bp, Homo sapiens
actgctggccagtcccaaaatggaacataaggaagtggttcttctacttcttttatttctgaaatcaggtcaaggagagcctctggatgactatgtgaatrcccagggggcttcactgttcagtgtcactaagaagcagctgggagcaggaagtatagaagaatgtgcagcaaaatgtgaggaggacgaagaattcacctg

SEQ ID NO: 2645 - DNA, 138 bp, Homo sapiens
ggtttgtggatgcgtttactctcatgtaagtcaacaayatcctgggattgggacccactttctgggcactgctggccagtcccaaaatggaacataaggaagtggttcttctacttcttttatttctgaaatcaggtc

SEQ ID NO: 2646 - DNA, 201 bp, Homo sapiens
gggcactgctggccagtcccaaaatggaacataaggaagtggttcttctacttcttttatttctgaaatcaggtcaaggagagcctctggatgactatgtraatacccagggggcttcactgttcagtgtcactaagaagcagctgggagcaggaagtatagaagaatgtgcagcaaaatgtgaggaggacgaagaattca

SEQ ID NO: 2647 - DNA, 104 bp, Homo sapiens
ggtytgtggatgcgtttactctcatgtaagtcaacaacatcctgggattgggacccactttctgggcactgctggccagtcccaaaatggaacataaggaagtg

SEQ ID NO: 2648 - DNA, 201 bp, Homo sapiens
tgacatttgttaaaaataaactctgtacttaactttgatttgagtaaattttggttttggtcttcaacattttcatgctctttgttcaccccaccaattttaaatgggcagatggggggatttagctgcttttgataaggaacagctgcacaaaggactgagcaggctgcaaggtcacagaggggagagccaagaagttgt

SEQ ID NO: 2649 - DNA, 201 bp, Homo sapiens
gcaatcgctatgagtttctgaatggaagagtccaatccaccgaactctgtgctgggcatttggccggaggcactgacagttgccagggtgacagtggaggkcctctggtttgcttcgagaaggacaaatacattttacaaggagtcacttcttggggtcttggctgtgcacgccccaataagcctggtgtctatgttcgtg

SEQ ID NO: 2650 - DNA, 201 bp, Homo sapiens
acagtaaagagcaacaatgtgtgataatggctgaaaacaggaagtcctccataatcattaggatgagagatgtagttttatttgaaaagaaagtgtatctytcagagtgcaagactgggaatggaaagaactacagagggacgatgtccaaaacaaaaaatggcatcacctgtcaaaaatggagttccacttctccccaca

SEQ ID NO: 2651 - DNA, 201 bp, Homo sapiens
ctctcagagtgcaagactgggaatggaaagaactacagagggacgatgtccaaaacaaaaaatggcatcacctgtcaaaaatggagttccacttctccccrcagacctagattctcacctgctacacacccctcagagggactggaggagaactactgcaggaatccagacaacgatccgcaggggccctggtgctatact

SEQ ID NO: 2652 - DNA, 201 bp, Homo sapiens
tcagagtgcaagactgggaatggaaagaactacagagggacgatgtccaaaacaaaaaatggcatcacctgtcaaaaatggagttccacttctccccacaracctagattctcacctgctacacacccctcagagggactggaggagaactactgcaggaatccagacaacgatccgcaggggccctggtgctatactact

SEQ ID NO: 2653 - DNA, 201 bp, Homo sapiens
gcccacacgaaaagatattgccttgctaaagctaagcagtcctgccgtcatcactgacaaagtaatcccagcttgtctgccatccccaaattatgtggtcrctgaccggaccgaatgtttcatcactggctggggagaaacccaaggtacttttggagctggccttctcaaggaagcccagctccctgtgattgagaataa

SEQ ID NO: 2654 - DNA, 201 bp, Homo sapiens
aaaatggcatcacctgtcaaaaatggagttccacttctccccacagacctagattctcacctgctacacacccctcagagggactggaggagaactactgmaggaatccagacaacgatccgcaggggccctggtgctatactactgatccagaaaagagatatgactactgcgacattcttgagtgtgaagaggaatgta

SEQ ID NO: 2655 - DNA, 201 bp, Homo sapiens
ttccaaacaagaacctgaagaagaattactgtcgtaaccccgatagggagctgcggccttggtgtttcaccaccgaccccaacaagcgctgggaactttgygacatcccccgctgcacaacacctccaccatcttctggtcccacctaccagtgtctgaagggaacaggtgaaaactatcgcgggaatgtggctgttaccg

SEQ ID NO: 2656 - DNA, 201 bp, Homo sapiens
acggaaaaagggccccatggtgccatacaaccaacagccaagtgcggtgggagtactgtaagataccgtcctgtgactcctccccagtatccacggaacarttggctcccacagcaccacctgagctaacccctgtggtccaggactgctaccatggtgatggacagagctaccgaggcacatcctccaccaccaccacag

SEQ ID NO: 2657 - DNA, 201 bp, Homo sapiens
ccacacgaaaagatattgccttgctaaagctaagcagtcctgccgtcatcactgacaaagtaatcccagcttgtctgccatccccaaattatgtggtcgcygaccggaccgaatgtttcatcactggctggggagaaacccaaggtacttttggagctggccttctcaaggaagcccagctccctgtgattgagaataaag

SEQ ID NO: 2658 - DNA, 201 bp, Homo sapiens
ttgtccacgcatttacctcatcagctaacgagggcttgacatgcatttttactgtctttattcctgacactgagatgaatgttttcaaagctgcaacatgyatggggagtcatgcgaaccgattctgttattgggaatgaaatctgtcaccgactgcttgacttgagcccaggggacacagagcagagagctgtatatgat

SEQ ID NO: 2659 - DNA, 201 bp, Homo sapiens
atgttcgtgtttcaaggtttgttacttggattgagggagtgatgagaaataattaattggacgggagacagagtgacgcactgactcacctagaggctggracgtgggtagggatttagcatgctggaaataactggcagtaatcaaacgaagacactgtccccagctaccagctacgccaaacctcggcattttttgtgt

SEQ ID NO: 2660 - DNA, 201 bp, Homo sapiens
agctccctgtgattgagaataaagtgtgcaatcgctatgagtttctgaatggaagagtccaatccaccgaactctgtgctgggcatttggccggaggcacygacagttgccagggtgacagtggagggcctctggtttgcttcgagaaggacaaatacattttacaaggagtcacttcttggggtcttggctgtgcacgcc

SEQ ID NO: 2661 - DNA, 201 bp, Homo sapiens
ggaagtggttcttctacttcttttatttctgaaatcaggtcaaggagagcctctggatgactatgtgaatacccagggggcttcactgttcagtgtcactragaagcagctgggagcaggaagtatagaagaatgtgcagcaaaatgtgaggaggacgaagaattcacctgcagggcattccaatatcacagtaaagagca

SEQ ID NO: 2662 - DNA, 201 bp, Homo sapiens
atgcgaaccgattctgttattgggaatgaaatctgtcaccgactgcttgacttgagcccaggggacacagagcagagagctgtatatgatggagtgaacckgtccatggatgtgtaacacaagaccaactgagagtctgaatgttattctggggcacacgtgagtctaggattggtgccaagagcatgtaaatgaacaaca

SEQ ID NO: 2663 - DNA, 201 bp, Homo sapiens
tgttttcaaagctgcaacatgcatggggagtcatgcgaaccgattctgttattgggaatgaaatctgtcaccgactgcttgacttgagcccaggggacacrgagcagagagctgtatatgatggagtgaaccggtccatggatgtgtaacacaagaccaactgagagtctgaatgttattctggggcacacgtgagtctag

SEQ ID NO: 2664 - DNA, 201 bp, Homo sapiens
gttgtagcacctccgcctgttgtcctgcttccagatgtagagactccttccgaagaagactgtatgtttgggaatgggaaaggataccgaggcaagagggygaccactgttactgggacgccatgccaggactgggctgcccaggagccccatagacacagcattttcactccagagacaaatccacgggcgggtctggaa

SEQ ID NO: 2665 - DNA, 201 bp, Homo sapiens
ccaggactgctaccatggtgatggacagagctaccgaggcacatcctccaccaccaccacaggaaagaagtgtcagtcttggtcatctatgacaccacacyggcaccagaagaccccagaaaactacccaaatgctggcctgacaatgaactactgcaggaatccagatgccgataaaggcccctggtgttttaccacaga

SEQ ID NO: 2666 - DNA, 201 bp, Homo sapiens
ctcacctgctacacacccctcagagggactggaggagaactactgcaggaatccagacaacgatccgcaggggccctggtgctatactactgatccagaasagagatatgactactgcgacattcttgagtgtgaagaggaatgtatgcattgcagtggagaaaactatgacggcaaaatttccaagaccatgtctggact

SEQ ID NO: 2667 - DNA, 201 bp, Homo sapiens; identical to SEQ ID NO: 2641

SEQ ID NO: 2668 - DNA, 201 bp, Homo sapiens; identical to SEQ ID NO: 2642

SEQ ID NO: 2669 - DNA, 155 bp, Homo sapiens; identical to SEQ ID NO: 2643

SEQ ID NO: 2670 - DNA, 201 bp, Homo sapiens; identical to SEQ ID NO: 2627

SEQ ID NO: 2671 - DNA, 201 bp, Homo sapiens; identical to SEQ ID NO: 2644

SEQ ID NO: 2672 - DNA, 138 bp, Homo sapiens; identical to SEQ ID NO: 2645

SEQ ID NO: 2673 - DNA, 201 bp, Homo sapiens; identical to SEQ ID NO: 2646

SEQ ID NO: 2674 - DNA, 104 bp, Homo sapiens; identical to SEQ ID NO: 2647

SEQ ID NO: 2675 - DNA, 201 bp, Homo sapiens
atccacagttggttgaatttgtggatctggaacccatggatacagagggccaactgtatttaggataatttcatcacttttaattcaaaccacaatatgtraataagcagatagaaagaatctttttgatgtcgatgttcaactatttttggcaccatagtagaacatggttgctttctattttttcttggatatggaggt

SEQ ID NO: 2676 - DNA, 201 bp, Homo sapiens
ttatactgtattgtttttatttgtattatgttttattgtcatattgttattttctgtcatctttttcaagtcttttccatccacagttggttgaatttgtkgatctggaacccatggatacagagggccaactgtatttaggataatttcatcacttttaattcaaaccacaatatgtgaataagcagatagaaagaatct

SEQ ID NO: 2677 - DNA, 201 bp, Homo sapiens; identical to SEQ ID NO: 2650

SEQ ID NO: 2678 - DNA, 201 bp, Homo sapiens
gaatggaaagaactacagagggacgatgtccaaaacaaaaaatggcatcacctgtcaaaaatggagttccacttctccccacagacctaggtaagacattycctttcatctttgtgttcatctactgtaaagttgtccctctgtgtctgtgagggattggttccaggacccctgtggctaccaaaatccatgcttctcaag

SEQ ID NO: 2679 - DNA, 201 bp, Homo sapiens
ctctcagagtgcaagactgggaatggaaagaactacagagggacgatgtccaaaacaaaaaatggcatcacctgtcaaaaatggagttccacttctccccrcagacctaggtaagacattccctttcatctttgtgttcatctactgtaaagttgtccctctgtgtctgtgagggattggttccaggacccctgtggctac

SEQ ID NO: 2680 - DNA, 201 bp, Homo sapiens
tcagagtgcaagactgggaatggaaagaactacagagggacgatgtccaaaacaaaaaatggcatcacctgtcaaaaatggagttccacttctccccacaracctaggtaagacattccctttcatctttgtgttcatctactgtaaagttgtccctctgtgtctgtgagggattggttccaggacccctgtggctaccaa

SEQ ID NO: 2681 - DNA, 183 bp, Homo sapiens
gaatgcctagtttaaaaaaaatcaatgaaactatgagttttaggccaaatctgagaaaagatcaaagatgactatgtttgggactgaagtaagcatatcargttagaactctcatcacatgttcgactcaaattgtggagcaaaagagtaaataagatataaaaatgaaaatgaagatacgtg

SEQ ID NO: 2682 - DNA, 201 bp, Homo sapiens; identical to SEQ ID NO: 2636

SEQ ID NO: 2683 - DNA, 201 bp, Homo sapiens; identical to SEQ ID NO: 2634

SEQ ID NO: 2684 - DNA, 201 bp, Homo sapiens
gtttcttgaagacctagaacatagaagaatgcctagtttaaaaaaaatcaatgaaactatgagttttaggccaaatctgagaaaagatcaaagatgactaygtttgggactgaagtaagcatatcaagttagaactctcatcacatgttcgactcaaattgtggagcaaaagagtaaataagatataaaaatgaaaatgaa

SEQ ID NO: 2685 - DNA, 201 bp, Homo sapiens; identical to SEQ ID NO: 2661

SEQ ID NO: 2686 - DNA, 201 bp, Homo sapiens
ctgaaaacaggaagtcctccataatcattaggatgagagatgtagttttatttgaaaagaaagtgtatctctcagagtgcaagactgggaatggaaagaaytacagagggacgatgtccaaaacaaaaaatggcatcacctgtcaaaaatggagttccacttctccccacagacctaggtaagacattccctttcatcttt

SEQ ID NO: 2687 - DNA, 201 bp, Homo sapiens
aactgtatttaggataatttcatcacttttaattcaaaccacaatatgtgaataagcagatagaaagaatctttttgatgtcgatgttcaactatttttgkcaccatagtagaacatggttgctttctattttttcttggatatggaggtttcttgaagacctagaacatagaagaatgcctagtttaaaaaaaatcaatg

SEQ ID NO: 2688 - DNA, 201 bp, Homo sapiens
tctttttgatgtcgatgttcaactatttttggcaccatagtagaacatggttgctttctattttttcttggatatggaggtttcttgaagacctagaacayagaagaatgcctagtttaaaaaaaatcaatgaaactatgagttttaggccaaatctgagaaaagatcaaagatgactatgtttgggactgaagtaagcat

SEQ ID NO: 2689 - DNA, 201 bp, Homo sapiens
agaaagaatctttttgatgtcgatgttcaactatttttggcaccatagtagaacatggttgctttctattttttcttggatatggaggtttcttgaagacytagaacatagaagaatgcctagtttaaaaaaaatcaatgaaactatgagttttaggccaaatctgagaaaagatcaaagatgactatgtttgggactgaa

SEQ ID NO: 2690 - DNA, 201 bp, Homo sapiens
atgcttctcaagtcccttatataaaatggtgcagtatttgcatataacctacataccttctcttgtataatccctaatataatgtaaatgctatttaatcrttgttatactgtattgtttttatttgtattatgttttattgtcatattgttattttctgtcatctttttcaagtcttttccatccacagttggttgaatt

SEQ ID NO: 2691 - DNA, 201 bp, Homo sapiens; identical to SEQ ID NO: 2640

SEQ ID NO: 2692 - DNA, 201 bp, Homo sapiens
aaatccatgcttctcaagtcccttatataaaatggtgcagtatttgcatataacctacataccttctcttgtataatccctaatataatgtaaatgctatktaatcgttgttatactgtattgtttttatttgtattatgttttattgtcatattgttattttctgtcatctttttcaagtcttttccatccacagttggt

SEQ ID NO: 2693 - DNA, 201 bp, Homo sapiens
atacctactaaataggtcaaggagagcctctggatgactatgtgaatacccagggggcttcactgttcagtgtcactaagaagcagctgggagcaggaagyatagaagaatgtgcagcaaaatgtgaggaggacgaagaattcacctgcagggcattccaatatcacagtaaagagcaacaatgtgtgataatggctgaaa

SEQ ID NO: 2694 - DNA, 176 bp, Homo sapiens
cacccaggtagtgagctaaatacctactaaataggtcaaggagagcctctggatgactatgtgaatacccaggggscttcactgttcagtgtcactaagaagcagctgggagcaggaagtatagaagaatgtgcagcaaaatgtgaggaggacgaagaattcacctgcagggcatt

SEQ ID NO: 2695 - DNA, 201 bp, Homo sapiens; identical to SEQ ID NO: 2627

SEQ ID NO: 2696 - DNA, 167 bp, Homo sapiens
cacccaggtagtgagctaaatacctactaaataggtcaaggagagcctctggatgactatgtgaatrcccagggggcttcactgttcagtgtcactaagaagcagctgggagcaggaagtatagaagaatgtgcagcaaaatgtgaggaggacgaagaattcacctg

SEQ ID NO: 2697 - DNA, 163 bp, Homo sapiens
cacccaggtagtgagctaaatacctactaaataggtcaaggagagcctctggatgactatgtraatacccagggggcttcactgttcagtgtcactaagaagcagctgggagcaggaagtatagaagaatgtgcagcaaaatgtgaggaggacgaagaattca

SEQ ID NO: 2698 - DNA, 201 bp, Homo sapiens; identical to SEQ ID NO: 2675

SEQ ID NO: 2699 - DNA, 201 bp, Homo sapiens; identical to SEQ ID NO: 2676

SEQ ID NO: 2700 - DNA, 201 bp, Homo sapiens; identical to SEQ ID NO: 2650

SEQ ID NO: 2701 - DNA, 201 bp, Homo sapiens; identical to SEQ ID NO: 2678

SEQ ID NO: 2702 - DNA, 201 bp, Homo sapiens; identical to SEQ ID NO: 2679

SEQ ID NO: 2703 - DNA, 201 bp, Homo sapiens; identical to SEQ ID NO: 2680

SEQ ID NO: 2704 - DNA, 183 bp, Homo sapiens; identical to SEQ ID NO: 2681

SEQ ID NO: 2705 - DNA, 201 bp, Homo sapiens; identical to SEQ ID NO: 2636

SEQ ID NO: 2706 - DNA, 201 bp, Homo sapiens; identical to SEQ ID NO: 2634

SEQ ID NO: 2707 - DNA, 201 bp, Homo sapiens; identical to SEQ ID NO: 2684

SEQ ID NO: 2708 - DNA, 201 bp, Homo sapiens; identical to SEQ ID NO: 2687

SEQ ID NO: 2709 - DNA, 197 bp, Homo sapiens
cacccaggtagtgagctaaatacctactaaataggtcaaggagagcctctggatgactatgtgaatacccagggggcttcactgttcagtgtcactragaagcagctgggagcaggaagtatagaagaatgtgcagcaaaatgtgaggaggacgaagaattcacctgcagggcattccaatatcacagtaaagagca

SEQ ID NO: 2710 - DNA, 201 bp, Homo sapiens; identical to SEQ ID NO: 2686

SEQ ID NO: 2711 - DNA, 201 bp, Homo sapiens; identical to SEQ ID NO: 2688

SEQ ID NO: 2712 - DNA, 201 bp, Homo sapiens; identical to SEQ ID NO: 2689

SEQ ID NO: 2713 - DNA, 201 bp, Homo sapiens; identical to SEQ ID NO: 2690

SEQ ID NO: 2714 - DNA, 201 bp, Homo sapiens
acctactaaataggtcaaggagagcctctggatgactatgtgaatacccagggggcttcactgttcagtgtcactaagaagcagctgggagcaggaagtakagaagaatgtgcagcaaaatgtgaggaggacgaagaattcacctgcagggcattccaatatcacagtaaagagcaacaatgtgtgataatggctgaaaac

SEQ ID NO: 2715 - DNA, 201 bp, Homo sapiens; identical to SEQ ID NO: 2692

SEQ ID NO: 2716 - DNA, 201 bp, Homo sapiens; identical to SEQ ID NO: 2641

SEQ ID NO: 2717 - DNA, 201 bp, Homo sapiens
attttcttcctcctcctcctactgtcctccccatcctcccactcttcctctttctctattctatctttaatttataagaccagaggaggaaggcactatcrtgttataaaactgaattctgagttaggacaggatttgattactaactaaccatgtcagcttgagtgtattacttcacctcttagatttaattttttttgt

SEQ ID NO: 2718 - DNA, 201 bp, Homo sapiens
acattttcttcctcctcctcctactgtcctccccatcctcccactcttcctctttctctattctatctttaatttataagaccagaggaggaaggcactaycatgttataaaactgaattctgagttaggacaggatttgattactaactaaccatgtcagcttgagtgtattacttcacctcttagatttaatttttttt

SEQ ID NO: 2719 - DNA, 201 bp, Homo sapiens; identical to SEQ ID NO: 2642

SEQ ID NO: 2720 - DNA, 155 bp, Homo sapiens; identical to SEQ ID NO: 2643

SEQ ID NO: 2721 - DNA, 201 bp, Homo sapiens
gaattcacctgcagggcattccaatatcacagtaaagagcaacaatgtgtgataatggctgaaaacaggaagtcctccataatcattaggatgagagatgyagttttatttgaaaagaaaggtgagtacattttcttcctcctcctcctactgtcctccccatcctcccactcttcctctttctctattctatctttaatt

SEQ ID NO: 2722 - DNA, 201 bp, Homo sapiens; identical to SEQ ID NO: 2644

SEQ ID NO: 2723 - DNA, 138 bp, Homo sapiens; identical to SEQ ID NO: 2645

SEQ ID NO: 2724 - DNA, 201 bp, Homo sapiens; identical to SEQ ID NO: 2646

SEQ ID NO: 2725 - DNA, 104 bp, Homo sapiens; identical to SEQ ID NO: 2647

SEQ ID NO: 2726 - DNA, 201 bp, Homo sapiens
aagtcctccataatcattaggatgagagatgtagttttatttgaaaagaaaggtgagtacattttcttcctcctcctcctactgtcctccccatcctcccrctcttcctctttctctattctatctttaatttataagaccagaggaggaaggcactatcatgttataaaactgaattctgagttaggacaggatttgatt

SEQ ID NO: 2727 - DNA, 201 bp, Homo sapiens
tgagtacattttcttcctcctcctcctactgtcctccccatcctcccactcttcctctttctctattctatctttaatttataagaccagaggaggaaggyactatcatgttataaaactgaattctgagttaggacaggatttgattactaactaaccatgtcagcttgagtgtattacttcacctcttagatttaattt

SEQ ID NO: 2728 - DNA, 201 bp, Homo sapiens
agcagctgggagcaggaagtatagaagaatgtgcagcaaaatgtgaggaggacgaagaattcacctgcagggcattccaatatcacagtaaagagcaacartgtgtgataatggctgaaaacaggaagtcctccataatcattaggatgagagatgtagttttatttgaaaagaaaggtgagtacattttcttcctcctcc

SEQ ID NO: 2729 - DNA, 201 bp, Homo sapiens
gaagaatgtgcagcaaaatgtgaggaggacgaagaattcacctgcagggcattccaatatcacagtaaagagcaacaatgtgtgataatggctgaaaacargaagtcctccataatcattaggatgagagatgtagttttatttgaaaagaaaggtgagtacattttcttcctcctcctcctactgtcctccccatcctcc

SEQ ID NO: 2730 - DNA, 201 bp, Homo sapiens; identical to SEQ ID NO: 2661

SEQ ID NO: 2731 - DNA, 201 bp, Homo sapiens; identical to SEQ ID NO: 2640

SEQ ID NO: 2732 - DNA, 201 bp, Homo sapiens; identical to SEQ ID NO: 2641

SEQ ID NO: 2733 - DNA, 201 bp, Homo sapiens; identical to SEQ ID NO: 2642

SEQ ID NO: 2734 - DNA, 155 bp, Homo sapiens; identical to SEQ ID NO: 2643

SEQ ID NO: 2735 - DNA, 201 bp, Homo sapiens; identical to SEQ ID NO: 2627

SEQ ID NO: 2736 - DNA, 201 bp, Homo sapiens; identical to SEQ ID NO: 2644

SEQ ID NO: 2737 - DNA, 138 bp, Homo sapiens; identical to SEQ ID NO: 2645

SEQ ID NO: 2738 - DNA, 201 bp, Homo sapiens; identical to SEQ ID NO: 2646

SEQ ID NO: 2739 - DNA, 104 bp, Homo sapiens; identical to SEQ ID NO: 2647

SEQ ID NO: 2740 - DNA, 201 bp, Homo sapiens
gggacgccatgccaggactgggctgcccaggagccccatagacacagcattttcactccagagacaaatccacgggcgggtctggaaaaaaattactgccrtaaccctgatggtgatgtaggtggtccctggtgctacacgacaaatccaagaaaactttacgactactgtgatgtccctcagtgtggtaggttgccttct

SEQ ID NO: 2741 - DNA, 201 bp, Homo sapiens; identical to SEQ ID NO: 2650

SEQ ID NO: 2742 - DNA, 201 bp, Homo sapiens; identical to SEQ ID NO: 2651

SEQ ID NO: 2743 - DNA, 201 bp, Homo sapiens; identical to SEQ ID NO: 2654

SEQ ID NO: 2744 - DNA, 201 bp, Homo sapiens; identical to SEQ ID NO: 2652

SEQ ID NO: 2745 - DNA, 201 bp, Homo sapiens; identical to SEQ ID NO: 2631

SEQ ID NO: 2746 - DNA, 201 bp, Homo sapiens; identical to SEQ ID NO: 2655

SEQ ID NO: 2747 - DNA, 201 bp, Homo sapiens; identical to SEQ ID NO: 2656

SEQ ID NO: 2748 - DNA, 201 bp, Homo sapiens; identical to SEQ ID NO: 2634

SEQ ID NO: 2749 - DNA, 201 bp, Homo sapiens; identical to SEQ ID NO: 2635

SEQ ID NO: 2750 - DNA, 201 bp, Homo sapiens; identical to SEQ ID NO: 2636

SEQ ID NO: 2751 - DNA, 201 bp, Homo sapiens; identical to SEQ ID NO: 2661

SEQ ID NO: 2752 - DNA, 201 bp, Homo sapiens; identical to SEQ ID NO: 2638

SEQ ID NO: 2753 - DNA, 201 bp, Homo sapiens; identical to SEQ ID NO: 2637

SEQ ID NO: 2754 - DNA, 201 bp, Homo sapiens
acaaatccaagaaaactttacgactactgtgatgtccctcagtgtggtaggttgccttctttttggtaaggaaactgcttacttaatatggatttgcaacmaaaaaggaaaagggcttctgagcagactgcttctggggaggagatagctgccctctccatcagaccccactcttcatcatgggcatcttgaatctgccct

SEQ ID NO: 2755 - DNA, 201 bp, Homo sapiens; identical to SEQ ID NO: 2664

SEQ ID NO: 2756 - DNA, 201 bp, Homo sapiens; identical to SEQ ID NO: 2665

SEQ ID NO: 2757 - DNA, 201 bp, Homo sapiens; identical to SEQ ID NO: 2640

SEQ ID NO: 2758 - DNA, 201 bp, Homo sapiens; identical to SEQ ID NO: 2666

SEQ ID NO: 2759 - DNA, 201 bp, Homo sapiens
aacatggaagttatgaagatgctgttcactctggagcccttaatgattgatctgatgttccttttatttataacaatgttaaatgcaattgtcttgtaccktgagttgagtattacacattaaagtaaagtacaagctgtaaacttgggtttttgtgatgtaggaaatggtttccatctgtactttggtcctctgatttca

SEQ ID NO: 2760 - DNA, 201 bp, Homo sapiens
ttcccataatggaaggctccacacccacttgggaccaggaaactatccgtgctaaaggtgtaagcccacgtttatcagcttctgacttcttcataagaacracagctgcagcaccatcatttattcctgaagcattggctggggtgactgttcccgttccatcagtaagaaagtaaggctttagcttggacatggcttcta

SEQ ID NO: 2761 - DNA, 201 bp, Homo sapiens
aaagaaattgaggttgttcaaagtttaagcaattcattctctctgaacacacattgctattcccatcccacccccaatgcacagggctgcaacaccacgayttctgcccattctctccagtgtgtgtaacagggtcacaagaattcgacagccagatgctccaagagggtggcccaaggctatagcccctccttcaatatt

SEQ ID NO: 2762 - DNA, 201 bp, Homo sapiens
aaggctatagcccctccttcaatattgacggtcctattcccataatggaaggctccacacccacttgggaccaggaaactatccgtgctaaaggtgtaagyccacgtttatcagcttctgacttcttcataagaacgacagctgcagcaccatcatttattcctgaagcattggctggggtgactgttcccgttccatcag

SEQ ID NO: 2763 - DNA, 201 bp, Homo sapiens
aatcaccattcttcgaattgatgatcttattaaattacatccagaaagtaaagatgataaacatggaagttatgaagatgctgttcactctggagcccttwatgattgatctgatgttccttttatttataacaatgttaaatgcaattgtcttgtaccttgagttgagtattacacattaaagtaaagtacaagctgtaa

SEQ ID NO: 2764 - DNA, 201 bp, Homo sapiens
tcccgttccatcagtaagaaagtaaggctttagcttggacatggcttctatgttgctcccatggcgaggaaactcatctgttttaacttcaataagacctyttctagttgacaccaaaactggtacaatctctttgtcaaaatggccagctttctgtgcattctctgtcctgttctgggacagaactgcaaccttgtcctg

SEQ ID NO: 2765 - DNA, 201 bp, Homo sapiens
tttgagcaatggtaaacctcgagacaacaaacaagcaggggtgtttgaaccaaccatagttaaagttaagagtttgaaatttgcaacagaagctgcaatcmccattcttcgaattgatgatcttattaaattacatccagaaagtaaagatgataaacatggaagttatgaagatgctgttcactctggagcccttaatga

SEQ ID NO: 2766 - DNA, 201 bp, Homo sapiens
atcaccattcttcgaattgatgatcttattaaattacatccagaaagtaaagatgataaacatggaagttatgaagatgctgttcactctggagcccttawtgattgatctgatgttccttttatttataacaatgttaaatgcaattgtcttgtaccttgagttgagtattacacattaaagtaaagtacaagctgtaaa

SEQ ID NO: 2767 - DNA, 201 bp, Homo sapiens
ccagaaagtaaagatgataaacatggaagttatgaagatgctgttcactctggagcccttaatgattgatctgatgttccttttatttataacaatgttaratgcaattgtcttgtaccttgagttgagtattacacattaaagtaaagtacaagctgtaaacttgggtttttgtgatgtaggaaatggtttccatctgta

SEQ ID NO: 2768 - DNA, 201 bp, Homo sapiens
cagccgggaagcgggtggggtggtgtgttacccagtagctcctgggacatcgctcgggtacgctccacgccgtcgcagccactgctgtggtcgccggtcgsccgaggggccgcgatactggttgcccgcggtgtaagcagaattcgacgtgtatcgctgccgtcaagatggaggggcctttgtccgtgttcggtgaccgca

SEQ ID NO: 2769 - DNA, 201 bp, Homo sapiens
ccttcccgccgtgccccgcggccgggccggggcagccgggaagcgggtggggtggtgtgttacccagtagctcctgggacatcgctcgggtacgctccacrccgtcgcagccactgctgtggtcgccggtcggccgaggggccgcgatactggttgcccgcggtgtaagcagaattcgacgtgtatcgctgccgtcaagat

SEQ ID NO: 2770 - DNA, 201 bp, Homo sapiens; identical to SEQ ID NO: 2759

SEQ ID NO: 2771 - DNA, 201 bp, Homo sapiens
ccattctctccagtgtgtgtaacagggtcacaagaattcgacagccagatgctccaagagggtggcccaaggctatagcccctccttcaatattgacctarcgggggagaaaagatttagattgtttattcttctgtggacacagtttaaaatcttaaacttgtctttttcctcttaatgtatcagcatgctaccctttca

SEQ ID NO: 2772 - DNA, 192 bp, Homo sapiens
cctgttgtccctgcctctttttccttcccgccgtgccccgcggccgggccggggcagccgggaagcgggtggggtggtgtgttacccagtakctcctgggacatcgctcgggtacgctccacgccgtcgcagccactgctgtggtcgccggtcggccgaggggccgcgatactggttgcccgcggtgtaagc

SEQ ID NO: 2773 - DNA, 201 bp, Homo sapiens; identical to SEQ ID NO: 2761

SEQ ID NO: 2774 - DNA, 201 bp, Homo sapiens; identical to SEQ ID NO: 2763

SEQ ID NO: 2775 - DNA, 201 bp, Homo sapiens; identical to SEQ ID NO: 2766

SEQ ID NO: 2776 - DNA, 201 bp, Homo sapiens; identical to SEQ ID NO: 2765

SEQ ID NO: 2777 - DNA, 201 bp, Homo sapiens; identical to SEQ ID NO: 2767

SEQ ID NO: 2778 - DNA, 201 bp, Homo sapiens
cttcccgccgtgccccgcggccgggccggggcagccgggaagcgggtggggtggtgtgttacccagtagctcctgggacatcgctcgggtacgctccacgycgtcgcagccactgctgtggtcgccggtcggccgaggggccgcgatactggttgcccgcggtgtaagcagaattcgacgtgtatcgctgccgtcaagatg

SEQ ID NO: 2779 - DNA, 201 bp, Homo sapiens; identical to SEQ ID NO: 2768

SEQ ID NO: 2780 - DNA, 201 bp, Homo sapiens; identical to SEQ ID NO: 2769

SEQ ID NO: 2781 - DNA, 201 bp, Homo sapiens; identical to SEQ ID NO: 2759

SEQ ID NO: 2782 - DNA, 192 bp, Homo sapiens; identical to SEQ ID NO: 2772

SEQ ID NO: 2783 - DNA, 201 bp, Homo sapiens; identical to SEQ ID NO: 2760

SEQ ID NO: 2784 - DNA, 201 bp, Homo sapiens; identical to SEQ ID NO: 2761

SEQ ID NO: 2785 - DNA, 201 bp, Homo sapiens; identical to SEQ ID NO: 2762

SEQ ID NO: 2786 - DNA, 201 bp, Homo sapiens; identical to SEQ ID NO: 2763

SEQ ID NO: 2787 - DNA, 201 bp, Homo sapiens; identical to SEQ ID NO: 2765

SEQ ID NO: 2788 - DNA, 201 bp, Homo sapiens; identical to SEQ ID NO: 2766

SEQ ID NO: 2789 - DNA, 201 bp, Homo sapiens; identical to SEQ ID NO: 2764

SEQ ID NO: 2790 - DNA, 201 bp, Homo sapiens; identical to SEQ ID NO: 2767

SEQ ID NO: 2791 - DNA, 201 bp, Homo sapiens; identical to SEQ ID NO: 2778

SEQ ID NO: 2792 - DNA, 193 bp, Homo sapiens
gcaaagctcctcctcgcagcccacaggcctgccgcgggcgggacctgagctcaggactggaatcccacgggcgagaatctcgagtgcgagcccggcccgcrgcgggtctcagcacagctctgatgggtccttttgctctcggcggcttcgggaggtcctatgcgtttctcctggcgccagtcattcgctcgcg

SEQ ID NO: 2793 - DNA, 201 bp, Homo sapiens
ctctaacctgccattggaacctcacccatagcccagaagcctcattcacaacccttcccagactccactccaacttagagaacctgaaaaatggacatgtrgacatgtatctgaaagaaagtctaggcggttgcacttagacaagggcctacggctttattaacagatgtcgaggaagctttcaggtgctggtagccatga

SEQ ID NO: 2794 - DNA, 201 bp, Homo sapiens
agaagcctcattcacaacccttcccagactccactccaacttagagaacctgaaaaatggacatgtggacatgtatctgaaagaaagtctaggcggttgcrcttagacaagggcctacggctttattaacagatgtcgaggaagctttcaggtgctggtagccatgagggtctggttttaaggatggcctttaaggaaagg

SEQ ID NO: 2795 - DNA, 105 bp, Homo sapiens
caaaataagaaagccatgttgttaaacagtagaggagccagggactctgtctccattctctcatcacacacaagtcatgcatctaccaaaaaaaaaaaaacaaaa

SEQ ID NO: 2796 - DNA, 201 bp, Homo sapiens
ggacatgtggacatgtatctgaaagaaagtctaggcggttgcacttagacaagggcctacggctttattaacagatgtcgaggaagctttcaggtgctggyagccatgagggtctggttttaaggatggcctttaaggaaaggccgtggcaggcgggctgagaggggcggctccagctcagccctgcccacagcacaggct

SEQ ID NO: 2797 - DNA, 166 bp, Homo sapiens
gaatggctttgtgcttagttttaattgtagtttgtgctattctgtgaattaacaattcaaacaaaataagaaagccatgttgttaaacagtagaggagccrgggactctgtctccattctctcatcacacacaagtcatgcatctaccaaaaaaaaaaaaacaaaa

SEQ ID NO: 2798 - DNA, 201 bp, Homo sapiens
taacagatgtcgaggaagctttcaggtgctggtagccatgagggtctggttttaaggatggcctttaaggaaaggccgtggcaggcgggctgagaggggckgctccagctcagccctgcccacagcacaggctcacagaagccgagatccacatcaccgcctggcatgcaaaggagttgaagacaaaaccatttttttcca

SEQ ID NO: 2799 - DNA, 201 bp, Homo sapiens
  misc_feature (1)...(201): n = A,T,C or G, or insertion/deletion polymorphism (see Tables 1-2)
gaaagagaagaggaggctccaaaggcacttgactactgagcatcaccctggacgtgtacaagtctgcgtccttattgttttcttcattgggccgaactttntggtcctcatccaacagctcttctatcacgtgttcgaaagtgtcagccaatgatgtcaagcctcttgaacctgccttgggcccattcacgctctccagag

SEQ ID NO: 2800 - DNA, 201 bp, Homo sapiens
tgactactgagcatcaccctggacgtgtacaagtctgcgtccttattgttttcttcattgggccgaactttctggtcctcatccaacagctcttctatcaygtgttcgaaagtgtcagccaatgatgtcaagcctcttgaacctgccttgggcccattcacgctctccagagtcccatgggtccgcacacctggagatact

SEQ ID NO: 2801 - DNA, 201 bp, Homo sapiens
aatgatgtcaagcctcttgaacctgccttgggcccattcacgctctccagagtcccatgggtccgcacacctggagatactctattatagcaaagaagaawgataatttcattgagccatcctgttttacaggaaattctgcaagtggcaacgtgggtccattccgtgtgtgtcactagagctggcgcaagcccatggcca

SEQ ID NO: 2802 - DNA, 201 bp, Homo sapiens; identical to SEQ ID NO: 2799
  misc_feature (1)...(201): n = A,T,C or G, or insertion/deletion polymorphism (see Tables 1-2)

SEQ ID NO: 2803 - DNA, 201 bp, Homo sapiens; identical to SEQ ID NO: 2800

SEQ ID NO: 2804 - DNA, 201 bp, Homo sapiens
aatgatgtcaagcctcttgaacctgccttgggcccattcacgctctccagagtcccatgggtccgcacacctggagatactctattatagcaaagaagaawgataatttcattgagccatcctgttttacagtattgaattattaccacaaggtaccaaccatatatgcatacttaatagggtattttgtcaaaactatgc

SEQ ID NO: 2805 - DNA, 201 bp, Homo sapiens
acaggacaagatggcccaggcctttgaggattggaataagacagagctagactcattcctgattgaaatcacagccaatattctcaagttccaaggtgctratggcaaacacttgctgccaaagatcagggacagtgcagggcagaagggcatggggaagtggaccaccatctctgccctggagtacggcatacccgtcac

SEQ ID NO: 2806 - DNA, 164 bp, Homo sapiens
atggcccaagctgacatcgtgctgatcggattggcagtcatgggccagaacttaattctgaccrtgaaagaccatggctttgtggtctgtgcttttaataggactgtctccgaagtggatgatttcttggccaatgaggcaaagggaaccaaagtggtgggtgc

SEQ ID NO: 2807 - DNA, 201 bp, Homo sapiens
cacctgatgaaagacgtgctgggcatggcacaggacaagatggcccaggcctttgaggattggaataagacagagctagactcattcctgattgaaatcasagccaatattctcaagttccaaggtgctgatggcaaacacttgctgccaaagatcagggacagtgcagggcagaagggcatggggaagtggaccaccatc

SEQ ID NO: 2808 - DNA, 201 bp, Homo sapiens
ctagcaaaaagctgaagggtccccaaaagttccagtttgatggctttatgctgctaaggcagggagccaccgagtttggctggaccctcaattatggtgayattgccctgatgtggagagggggctgcattattagaagtgtattcctaggaaagataaaggatgcgtttgatcgaaacccagaacctcagaacctcctac

SEQ ID NO: 2809 - DNA, 201 bp, Homo sapiens
gtgctgatggcaaacacttgctgccaaagatcagggacagtgcagggcagaagggcatggggaagtggaccaccatctctgccctggagtacggcataccygtcaccctcattggagaagccgtctttgcttggtgcctgtcatctctgaaggatgggagaattcaagctagcaaaaagctgaagggtccccaaaagttcc

SEQ ID NO: 2810 - DNA, 201 bp, Homo sapiens
ccaccgagtttggctggaccctcaattatggtgacattgccctgatgtggagagggggctgcattattagaagtgtattcctaggaaagataaaggatgcrtttgatcgaaacccagaacctcagaacctcctactggacgacttcttaagtcagctgttgaaaaccgctaggactcttggtggtgggcagtcagcactgg

SEQ ID NO: 2811 - DNA, 124 bp, Homo sapiens
atggcccaagctgacatcgtgctratcggattggcagtcatgggccagaacttaattctgaccatgaaagaccatggctttgtggtctgtgcttttaataggactgtctccgaagtggatgatt

SEQ ID NO: 2812 - DNA, 128 bp, Homo sapiens
atggcccaagctgacatcgtgctgatcrgattggcagtcatgggccagaacttaattctgaccatgaaagaccatggctttgtggtctgtgcttttaataggactgtctccgaagtggatgatttctt

SEQ ID NO: 2813 - DNA, 201 bp, Homo sapiens
tatagggacaccacaagacggtgccaagacctcaaggccaagggaattttatttgtggggagcggagtcagtggtggagaggaaggggcctggatagagtrtggggacatgcagctgatctgtgaggcataccacctgatgaaagacgtgctgggcatggcacaggacaagatggcccaggcctttgaggattggaataag

SEQ ID NO: 2814 - DNA, 201 bp, Homo sapiens
atcatcattgatggaggaaattctgaatatagggacaccacaagacggtgccaagacctcaaggccaagggaattttatttgtggggagcggagtcagtgrtggagaggaaggggcctggatagagtatggggacatgcagctgatctgtgaggcataccacctgatgaaagacgtgctgggcatggcacaggacaagatg

SEQ ID NO: 2815 - DNA, 201 bp, Homo sapiens
ggcattcccatgccctgttttgtcactgccctctccttctatgacaagtacagacacgagatgcttccagccaacctcatccaggctcagcgggattcctytggggctcacacctatgaactcttggccaaaccagggcagtttatccacaccaactggacaggccacggtggcagtgtatcatcctcgtcatacaatgcc

SEQ ID NO: 2816 - DNA, 201 bp, Homo sapiens
tgctgatcggattggcagtcatgggccagaacttaattctgaccatgaaagaccatggctttgtggtctgtgcttttaataggactgtctccgaagtggaygatttcttggccaatgaggcaaagggaaccaaagtggtgggtgcccagtccctgaaagagatggtctccaagctgaagaagccccagcggatcatcctcc

SEQ ID NO: 2817 - DNA, 201 bp, Homo sapiens
tggcacaggacaagatggcccaggcctttgaggattggaataagacagagctagactcattcctgattgaaatcacagccaatattctcaagttccaaggygctgatggcaaacacttgctgccaaagatcagggacagtgcagggcagaagggcatggggaagtggaccaccatctctgccctggagtacggcatacccg

SEQ ID NO: 2818 - DNA, 201 bp, Homo sapiens
cctgtcttagcactgccctgctagctcttcctgaaaaggcctataaataaacagggctggctgttcgctcgtgctatggggagtccctgatgggcacagaygggagtggctggggcgtacctcggtgggtgcacacatgttgctggccaggaagatgccgtggcaggccctggaggaggctcttgacattagggggctttg

SEQ ID NO: 2819 - DNA, 201 bp, Homo sapiens
tctggaaaaaaaagaaaaaagatacgactctcagaagcctgttttaaggaagccctaaaatgtggactgggtttcctgtcttagcactgccctgctagctyttcctgaaaaggcctataaataaacagggctggctgttcgctcgtgctatggggagtccctgatgggcacagacgggagtggctggggcgtacctcggtg

SEQ ID NO: 2820 - DNA, 201 bp, Homo sapiens
tcatccccgtggcgtacttggtcttctgggccttcctgctggtcttcagcttcatctcagagcctatggtctgtggggtcggcgtcatcatcatccttackggggtgcccattttctttctgggagtgttctggagaagcaaaccaaagtgtgtgcacagactcacagagtccatgacacactggggccaggagctgtgtt

SEQ ID NO: 2821 - DNA, 201 bp, Homo sapiens
gtccccccaggagctgctctcctccaatgcggtggctgtggtgagtgggcccctgctcggtccctggctcctgcccaggcccctgccccggccttacacayggcctctctactgtgcccacccagaccttcggggagaagctgctgggctacttttcttgggtcatgcctgtctccgtggctctgtcaaccttcggaggga

SEQ ID NO: 2822 - DNA, 201 bp, Homo sapiens
ggctgtgcttctctggagcccgcgaggggcacctgcccagcctgctggccatgatccacgtcagacactgcacccccatccccgccctcctcgtctgttgyggggccacagccgtcatcatgctcgtgggcgacacgtacacgctcatcaactatgtgtccttcatcaactacctctgctacggcgtcaccatcctgggcc

SEQ ID NO: 2823 - DNA, 144 bp, Homo sapiens
gaggatggggtagcagctcagtccgcccctaccccaggcccctcgatgccagtctgagctcggccacccaggagagctcaggggctccaggctgggattgyctttcttcccgtaaatcaccacagagtgaaggtcaggacttca

SEQ ID NO: 2824 - DNA, 201 bp, Homo sapiens
tgctctcctccaatgcggtggctgtggtgagtgggcccctgctcggtccctggctcctgcccaggcccctgccccggccttacacatggcctctctactgygcccacccagaccttcggggagaagctgctgggctacttttcttgggtcatgcctgtctccgtggctctgtcaaccttcggagggatcaatggttacctg

SEQ ID NO: 2825 - DNA, 201 bp, Homo sapiens
ctcgtgggcgacacgtacacgctcatcaactatgtgtccttcatcaactacctctgctacggcgtcaccatcctgggcctgctgctgctgcgctggaggcrgcctgcactccacaggcccatcaaggtgaaccttctcatccccgtggcgtacttggtcttctgggccttcctgctggtcttcagcttcatctcagagcct

SEQ ID NO: 2826 - DNA, 201 bp, Homo sapiens
gctacttttcttgggtcatgcctgtctccgtggctctgtcaaccttcggagggatcaatggttacctgttcacctactccaggtgactgcactggggagaygtgggcatggggagggaaggctggggtgcaggtgtgcaccagtcatgccgtgggccagaggaagggacacctgccgggggaggggtctgcctgaagctgg

SEQ ID NO: 2827 - DNA, 201 bp, Homo sapiens; identical to SEQ ID NO: 2818

SEQ ID NO: 2828 - DNA, 201 bp, Homo sapiens; identical to SEQ ID NO: 2819

SEQ ID NO: 2829 - DNA, 201 bp, Homo sapiens; identical to SEQ ID NO: 2820

SEQ ID NO: 2830 - DNA, 201 bp, Homo sapiens; identical to SEQ ID NO: 2821

SEQ ID NO: 2831 - DNA, 201 bp, Homo sapiens; identical to SEQ ID NO: 2822

SEQ ID NO: 2832 - DNA, 144 bp, Homo sapiens; identical to SEQ ID NO: 2823

SEQ ID NO: 2833 - DNA, 201 bp, Homo sapiens; identical to SEQ ID NO: 2824

SEQ ID NO: 2834 - DNA, 201 bp, Homo sapiens; identical to SEQ ID NO: 2825

SEQ ID NO: 2835 - DNA, 201 bp, Homo sapiens; identical to SEQ ID NO: 2826

SEQ ID NO: 2836 - DNA, 201 bp, Homo sapiens; identical to SEQ ID NO: 2818

SEQ ID NO: 2837 - DNA, 201 bp, Homo sapiens; identical to SEQ ID NO: 2820

SEQ ID NO: 2838 - DNA, 201 bp, Homo sapiens; identical to SEQ ID NO: 2822

SEQ ID NO: 2839 - DNA, 201 bp, Homo sapiens
gggggcgtgacggctctgggctccctctgctatgcagagctgggagtcgccatccccaagtctggcggggactacgcctacgtcacagagatcttcggggrcctggctggctttctgctgctctggagcgccgtcctcatcatgtaccccaccagccttgctgtcatctccatgaccttctccaactacgtgctgcagccc

SEQ ID NO: 2840 - DNA, 144 bp, Homo sapiens; identical to SEQ ID NO: 2823

SEQ ID NO: 2841 - DNA, 201 bp, Homo sapiens; identical to SEQ ID NO: 2819

SEQ ID NO: 2842 - DNA, 201 bp, Homo sapiens; identical to SEQ ID NO: 2825

SEQ ID NO: 2843 - DNA, 201 bp, Homo sapiens
ccggcccgtggcagtgcaacacggtggacgagtgtggagacggctctgatgagggcaactgctcggcgcccgcctccgagcctccaggcagcctgtgcccyggggggaccttcccatgcagcggggcgcgctccacgcgctgcctgcctgtggagcggcgctgtgacggcttgcaggactgcggcgacggctcggatgagg

SEQ ID NO: 2844 - DNA, 201 bp, Homo sapiens
caaagccccctaatgtcaagagcctcctccagggcctgccacggcatcttcctggccagcaacatgtgtgcacccaccgaggtacgccccagccactcccrtctgtgcccatcagggactccccatagcacgagcgaacagccagccctgtttatttataggccttttcaggaagagctagcagggcagtgctaagacagg

SEQ ID NO: 2845 - DNA, 201 bp, Homo sapiens
gcacgtggctggtggacacacaggactcccggcgggtgctgctgcagctggaactgcggctgggctatgacgactacgtgcaggtatacgagggcctgggygagcgcggggaccgcctgctgcagacgctgtcctaccgcagcaaccaccggcccgtgagcctggaggccgcccagggccgcctcaccgtggcctaccacg

SEQ ID NO: 2846 - DNA, 201 bp, Homo sapiens
ggaagctggagcagcacacggagcggcgtggggtcatctacagcccggcctggcccctcaactacccgccaggcaccaactgcagctggtacatccagggygaccgtggtgacatgattaccatcagcttccgcaactttgacgtggaggagtcccaccagtgctccctggactggctcctgctgggcccagcagccccac

SEQ ID NO: 2847 - DNA, 201 bp, Homo sapiens
caccgaggtacgccccagccactcccgtctgtgcccatcagggactccccatagcacgagcgaacagccagccctgtttatttataggccttttcaggaaragctagcagggcagtgctaagacaggaaacccagtccacattttagggcttccttaaaacaggcttctgagagtcgtatcttttttcttttttttccaga

SEQ ID NO: 2848 - DNA, 201 bp, Homo sapiens
acggctctgatgagggcaactgctcggcgcccgcctccgagcctccaggcagcctgtgccccggggggaccttcccatgcagcggggcgcgctccacgcgytgcctgcctgtggagcggcgctgtgacggcttgcaggactgcggcgacggctcggatgaggcgggctgccccgacctggcgtgcggccggcggctgggca

SEQ ID NO: 2849 - DNA, 201 bp, Homo sapiens
actgcggcgacggctcggatgaggcgggctgccccgacctggcgtgcggccggcggctgggcagcttctacggctcctttgcctccccagacctgttcggygccgctcgcgggccctcagaccttcactgcacgtggctggtggacacacaggactcccggcgggtgctgctgcagctggaactgcggctgggctatgacg

SEQ ID NO: 2850 - DNA, 201 bp, Homo sapiens
atctctgcccgcgaccatgtctggattttcttccactcagacgcctccagctccggccaggcccagggcttccgtctgtcttacatccgagggaagctggrccaggcatcctgccaggcagatgagttccgctgtgacaacggcaagtgcctgcccggcccgtggcagtgcaacacggtggacgagtgtggagacggctct

SEQ ID NO: 2851 - DNA, 201 bp, Homo sapiens
gctgtacatgaagcccctggagttccctgcaggcctcaaagcccccaggacatgctgctctgtgctttctggggacagagaggccgaggcaccaacagcartggccacgtctgttccatcctatctcagggcctcggtttccccacctgtaagccagggtgagactgtgggctctgaagtcctgaccttcactctgtggtg

SEQ ID NO: 2852 - DNA, 201 bp, Homo sapiens
gcctctggaggacctgggttgggtggctcctgccaaaccctcatgcccctggccaggcaggcgccctttgccctccctgaaggtccaatctcctgggcacygtggaagggctggggtgtgtgcctgctgtacatgaagcccctggagttccctgcaggcctcaaagcccccaggacatgctgctctgtgctttctggggac

SEQ ID NO: 2853 - DNA, 201 bp, Homo sapiens
tagcggcctgcagtgggaagctggagcagcacacggagcggcgtggggtcatctacagcccggcctggcccctcaactacccgccaggcaccaactgcagytggtacatccagggcgaccgtggtgacatgattaccatcagcttccgcaactttgacgtggaggagtcccaccagtgctccctggactggctcctgctgg

SEQ ID NO: 2854 - DNA, 201 bp, Homo sapiens
tgctggtcatcgcgctgggctgcgccttcaagctctactcactgcgcacgcaggaatacagggccttcgagacccagatgacgcgcctggaggctgagttygtgcggcgggaggcacccccatcctatggtcagctcatcgcccagggcctcattccacccgtggaggactttcctgtctacagtgcgtcccaggcctctg

SEQ ID NO: 2855 - DNA, 201 bp, Homo sapiens
atcctatctcagggcctcggtttccccacctgtaagccagggtgagactgtgggctctgaagtcctgaccttcactctgtggtgatttacgggaagaaagrcaatcccagcctggagcccctgagctctcctgggtggccgagctcagactggcatcgaggggcctggggtaggggcggactgagctgctaccccatcctc

SEQ ID NO: 2856 - DNA, 201 bp, Homo sapiens
cctgggcccccactcgccagagccactgggggtctgcaggaaccccccgcccccctgctccccaatgctggaggccagcgatgatgaggccctgttggtcwgttgaccgctgggctcgctggtgaccgccacagccccgctttgtaaccagggaatacacagtcatttctaccctgcctctgcgtcctttcttatggagag

SEQ ID NO: 2857 - DNA, 201 bp, Homo sapiens
agctggccgtcgtctgtctggtgaacatctttctcaccgggagactcagcagtgcggttcctgccttagcggcctgcagtgggaagctggagcagcacacrgagcggcgtggggtcatctacagcccggcctggcccctcaactacccgccaggcaccaactgcagctggtacatccagggcgaccgtggtgacatgatta

SEQ ID NO: 2858 - DNA, 201 bp, Homo sapiens
cgtgcgggagcagtagtgacagtgacgggggcagcctgggcgaccagggctgcttctcagagccacagcgctgtgatggctggtggcattgtgccagcggycgagacgagcagggctgccctgcctgcccgcccgaccagtacccctgcgagggtggcagtggtctgtgctacacgcctgccgaccgctgcaacaaccaga

SEQ ID NO: 2859 - DNA, 201 bp, Homo sapiens
ccggaggtgggaccttcagggccacccttgccctcgggcctgcgagacccagagtgcaggcccgtggacaaggacagaaaggtctgcagggagccactggyagacggcccagctcctgcagatgcacctcgggagccctgctcagcccaggacccgcacccccaggtctccactgccagcagcaccctgggcccccactcg

SEQ ID NO: 2860 - DNA, 201 bp, Homo sapiens
acgagggcctgggcgagcgcggggaccgcctgctgcagacgctgtcctaccgcagcaaccaccggcccgtgagcctggaggccgcccagggccgcctcacygtggcctaccacgcgcgcgcccgcagcgccggccacggcttcaatgccacctaccaggtgaagggctattgcctcccctgggagcagccgtgcgggagca

SEQ ID NO: 2861 - DNA, 201 bp, Homo sapiens
acggttttggcgggcaggatggtggtgagctgcggccgctgcagagtgaaggcgctgcagcgctggtcaccaaggggtgccagcgattggcagcccagggygcacggcctgaggcccccaaacggaaatgggccgaggatggtggggatgccccttcacccagcaaacggccctgggccaggcaagagaaccaggaggcag

SEQ ID NO: 2862 - DNA, 201 bp, Homo sapiens
tcccaagcccttagggaccgcagaggacttggggaccagcaagcaacccccagggcacgagaagagctcttgctgtctgccctgcctcaccctgccccacrccaggcccggtggcccccagctgcatcaagtggaggcggaggaggaggcggaggagggtggcaccatgggcccgggcggtgccctccatgcccgggggat

SEQ ID NO: 2863 - DNA, 201 bp, Homo sapiens
aaggccatgaaccaggctgtcgaagcattggtgccctcatggcccatgtggacgccgtcatccgccactgcgcagggcggctgggcagctatgtcatcaaygggcgcaccaaggccatggtggcgtgttacccaggcaacgggctcgggtacgtaaggcacgttgacaatccccacggcgatgggcgctgcatcacctgta

SEQ ID NO: 2864 - DNA, 201 bp, Homo sapiens
ccgtggtagccaacatcgagccactctttgaccggttgctcattttctggtctgaccggcggaacccccacgaggtgaagccagcctatgccaccaggtaygccatcactgtctggtattttgatgccaaggagcgggcagcagccaaagacaagtatcagctagcatcaggacagaaaggtgtccaagtacctgtatcac

SEQ ID NO: 2865 - DNA, 201 bp, Homo sapiens
tgggggcagcactgggcggtcgcgtgctggccgaggtggaggccctcaaacggggtgggcgcctgcgagacgggcagctagtgagccagagggcgatcccrccgcgcagcatccgtggggaccagattgcctgggtggaaggccatgaaccaggctgtcgaagcattggtgccctcatggcccatgtggacgccgtcatcc

SEQ ID NO: 2866 - DNA, 142 bp, Homo sapiens
gctttcccctgcctgcctgtctctagtttctctcacatccctttttttttttcctttctctagccaccctgaagggtcccttcccaagcccttagggaccgcagaggacttggggaccagcaagcaacccccagggcacgag

SEQ ID NO: 2867 - DNA, 201 bp, Homo sapiens
atgtggacgccgtcatccgccactgcgcagggcggctgggcagctatgtcatcaacgggcgcaccaaggccatggtggcgtgttacccaggcaacgggctygggtacgtaaggcacgttgacaatccccacggcgatgggcgctgcatcacctgtatctattacctgaatcagaactgggacgttaaggtgcatggcggcc

SEQ ID NO: 2868 - DNA, 201 bp, Homo sapiens
ggacttggggaccagcaagcaacccccagggcacgagaagagctcttgctgtctgccctgcctcaccctgccccacgccaggcccggtggcccccagctgyatcaagtggaggcggaggaggaggcggaggagggtggcaccatgggcccgggcggtgccctccatgcccgggggatgaagacactgctgccatggacagc

SEQ ID NO: 2869 - DNA, 201 bp, Homo sapiens
tctggtctgaccggcggaacccccacgaggtgaagccagcctatgccaccaggtacgccatcactgtctggtattttgatgccaaggagcgggcagcagcyaaagacaagtatcagctagcatcaggacagaaaggtgtccaagtacctgtatcacagccgcctacgcccacctagtggccagtcccagagccgcatggca

SEQ ID NO: 2870 - DNA, 154 bp, Homo sapiens
gctttcccctgcctgcctgtctctagtttctctcacatccctttttttttttcytttctctagccaccctgaagggtcccttcccaagcccttagggaccgcagaggacttggggaccagcaagcaacccccagggcacgagaagagctcttgc

SEQ ID NO: 2871 - DNA, 201 bp, Homo sapiens
ccaaggaggagaagagacctttgctgccccatcatgggggctggggttgtcacctggacagggggcagccgtggaggccaccgttaccaactgaagctggrggcctgggtcctaccctgtctggtcatgaccccattaggtatggagagctgggaggaggcattgtcacttcccaccaggatgcaggacttggggttgagg

SEQ ID NO: 2872 - DNA, 201 bp, Homo sapiens
acttcccaccaggatgcaggacttggggttgaggtgagtcatggcctcttgctggcaatggggtgggaggagtacccccaagtcctctcactcctccagcmtggaatgtgaagtgactccccaacccctttggccatggcaggcaccttttggactgggctgccactgcttgggcagagtaaaaggtgccaggaggagcat

SEQ ID NO: 2873 - DNA, 201 bp, Homo sapiens; identical to SEQ ID NO: 2861

SEQ ID NO: 2874 - DNA, 201 bp, Homo sapiens; identical to SEQ ID NO: 2862

SEQ ID NO: 2875 - DNA, 201 bp, Homo sapiens; identical to SEQ ID NO: 2863

SEQ ID NO: 2876 - DNA, 201 bp, Homo sapiens; identical to SEQ ID NO: 2864

SEQ ID NO: 2877 - DNA, 201 bp, Homo sapiens; identical to SEQ ID NO: 2865

SEQ ID NO: 2878 - DNA, 201 bp, Homo sapiens; identical to SEQ ID NO: 2868

SEQ ID NO: 2879 - DNA, 201 bp, Homo sapiens; identical to SEQ ID NO: 2867

SEQ ID NO: 2880 - DNA, 201 bp, Homo sapiens; identical to SEQ ID NO: 2869

SEQ ID NO: 2881 - DNA, 201 bp, Homo sapiens; identical to SEQ ID NO: 2871

SEQ ID NO: 2882 - DNA, 201 bp, Homo sapiens; identical to SEQ ID NO: 2872

SEQ ID NO: 2883 - DNA, 201 bp, Homo sapiens; identical to SEQ ID NO: 2861

SEQ ID NO: 2884 - DNA, 201 bp, Homo sapiens; identical to SEQ ID NO: 2862

SEQ ID NO: 2885 - DNA, 201 bp, Homo sapiens; identical to SEQ ID NO: 2863

SEQ ID NO: 2886 - DNA, 201 bp, Homo sapiens; identical to SEQ ID NO: 2864

SEQ ID NO: 2887 - DNA, 201 bp, Homo sapiens; identical to SEQ ID NO: 2865

SEQ ID NO: 2888 - DNA, 201 bp, Homo sapiens; identical to SEQ ID NO: 2868

SEQ ID NO: 2889 - DNA, 201 bp, Homo sapiens; identical to SEQ ID NO: 2867

SEQ ID NO: 2890 - DNA, 201 bp, Homo sapiens; identical to SEQ ID NO: 2869

SEQ ID NO: 2891 - DNA, 201 bp, Homo sapiens; identical to SEQ ID NO: 2871

SEQ ID NO: 2892 - DNA, 201 bp, Homo sapiens; identical to SEQ ID NO: 2872

SEQ ID NO: 2893 - DNA, 201 bp, Homo sapiens
gtgggaagagggtgcagcactggaccccttccctgccacccatccacgtgcatcatcagtgtaatctctgattggattcctaattggggaggtcttgcccrtctctagtcagtaactcactgtttctaagcctcctggaccatggcccaattcttctcccagtgaggtggttgctcagagtgccgacccttccatagggag

SEQ ID NO: 2894 - DNA, 201 bp, Homo sapiens; identical to SEQ ID NO: 2864

SEQ ID NO: 2895 - DNA, 201 bp, Homo sapiens
cccatccacgtgcatcatcagtgtaatctctgattggattcctaattggggaggtcttgcccatctctagtcagtaactcactgtttctaagcctcctggrccatggcccaattcttctcccagtgaggtggttgctcagagtgccgacccttccatagggagtgagcagtgcaaagaaggtgccccctcctgaaccttga

SEQ ID NO: 2896 - DNA, 201 bp, Homo sapiens
tatcttgaaacaaatcaaactctgttactaattgagccctagctgggtgccaggccccaggtatgtgtgttgggagggagtgggctcttgaggcccaggarctgaggtttctgatagacttggggatgggattttggctgaaaaagaaagtcttttggggcaggagcttggaacccttgacccaaggagtcatggggaaga

SEQ ID NO: 2897 - DNA, 201 bp, Homo sapiens; identical to SEQ ID NO: 2869

SEQ ID NO: 2898 - DNA, 201 bp, Homo sapiens; identical to SEQ ID NO: 2872

SEQ ID NO: 2899 - DNA, 201 bp, Homo sapiens
tgagtcccatgtgcttggtgggaggcgctgtgtgagaatgtacagggcaggaggaaacatagcagggctggggtgcagaggaggcccagagcagtgcactccagtctgcaggtactgcactgggcactggggagaccaacctggccccaggggcttccctgtggctgccttccagggcagtactaggtaaacaggtgcctg

SEQ ID NO: 2900 - DNA, 201 bp, Homo sapiens
ttcatggctgcttctctaagatgtgcctgcctagccccagtaaacctacctccctccatccctgccaggccatggtggcgtgttacccaggcaacgggctygggtacgtaaggcacgttgacaatccccacggcgatgggcgctgcatcacctgtatctattacctgaatcagaactgggacgttaaggtaggggtgaggg

SEQ ID NO: 2901 - DNA, 201 bp, Homo sapiens; identical to SEQ ID NO: 2871

SEQ ID NO: 2902 - DNA, 201 bp, Homo sapiens; identical to SEQ ID NO: 2861

SEQ ID NO: 2903 - DNA, 201 bp, Homo sapiens; identical to SEQ ID NO: 2862

SEQ ID NO: 2904 - DNA, 201 bp, Homo sapiens; identical to SEQ ID NO: 2863

SEQ ID NO: 2905 - DNA, 201 bp, Homo sapiens; identical to SEQ ID NO: 2864

SEQ ID NO: 2906 - DNA, 201 bp, Homo sapiens; identical to SEQ ID NO: 2865

SEQ ID NO: 2907 - DNA, 201 bp, Homo sapiens; identical to SEQ ID NO: 2868

SEQ ID NO: 2908 - DNA, 201 bp, Homo sapiens; identical to SEQ ID NO: 2867

SEQ ID NO: 2909 - DNA, 201 bp, Homo sapiens; identical to SEQ ID NO: 2869

SEQ ID NO: 2910 - DNA, 201 bp, Homo sapiens
ccaaggaggagaagagacctttgctgccccatcatgggggctggggttgtcacctggacagggggcagccgtggaggccaccgttaccaactgaagctggrggcctgggtcctaccctgtctggtcatgaccccattaggtatggagagctgggaggcaatggggtgggaggagtacccccaagtcctctcactcctccag

SEQ ID NO: 2911 - DNA, 119 bp, Homo sapiens
gcctgggtcctaccctgtctggtcatgaccccattaggtatggagagctgggaggcaatggggtgggaggagtacccccaagtcctctcactcctccagcmtggaatgtgaagtgactc

SEQ ID NO: 2912 - DNA, 201 bp, Homo sapiens
agtcctggattccacatgcagctcaaccgtacagttcctagaatatgaactaaatgttttgggaacacacaaaatcgaagatggtacgttagcctctaagrctaaaggaacatttgcacaccgtgacttcagtgcagaatatgaagaagatggcaaatatgaaggacttcaggaatgggaaggaaaagcgcacctcaatat

SEQ ID NO: 2913 - DNA, 201 bp, Homo sapiens
tggaaacaacccagtctcaaaaggtttactaatattcgatgcatctagttcctggggaccacagatgtctgcttcagttcatttggactccaaaaagaaayagcatttgtttgtcaaagaagtcaagattgatgggcagttcagagtctcttcgttctatgctaaaggcacatatggcctgtcttgtcagagggatcctaa

SEQ ID NO: 2914 - DNA, 201 bp, Homo sapiens
cttgtcatgcctacgttccatgtcccatttacagatcttcaggttccatcgtgcaaacttgacttcagagaaatacaaatctataagaagctgagaacttmatcatttgccctcaacctaccaacactccccgaggtaaaattccctgaagttgatgtgttaacaaaatattctcaaccagaagactccttgattcccttt

SEQ ID NO: 2915 - DNA, 201 bp, Homo sapiens
gcacttccaaaattgatgatatctggaaccttgaagtaaaagaaaattttgctggagaagccacactccaacgcatatattccctctgggagcacagtacraaaaaccacttacagctagagggcctctttttcaccaacggagaacatacaagcaaagccaccctggaactctctccatggcaaatgtcagctcttgttc

SEQ ID NO: 2916 - DNA, 201 bp, Homo sapiens
gtatctggaaagcctacaggacaccaaaataaccttaatcatcaattggttacaggaggctttaagttcagcatctttggctcacatgaaggccaaattcygagagaccctagaagatacacgagaccgaatgtatcaaatggacattcagcaggaacttcaacgatacctgtctctggtaggccaggtttatagcacact

SEQ ID NO: 2917 - DNA, 201 bp, Homo sapiens
tctgtctctgagcaacaaatttgtggagggtagtcataacagtactgtgagcttaaccacgaaaaatatggaagtgtcagtggcaacaaccacaaaagccsaaattccaattttgagaatgaatttcaagcaagaacttaatggaaataccaagtcaaaacctactgtctcttcctccatggaatttaagtatgatttcaa

SEQ ID NO: 2918 - DNA, 201 bp, Homo sapiens
aatcaagtgtcatcacactgaataccaatgctgaactttttaaccagtcagatattgttgctcatctcctttcttcatcttcatctgtcattgatgcactrcagtacaaattagagggcaccacaagattgacaagaaaaaggggattgaagttagccacagctctgtctctgagcaacaaatttgtggagggtagtcata

SEQ ID NO: 2919 - DNA, 201 bp, Homo sapiens
tcatctaccaaaggagatgtcaagggttcggttctttctcgggaatattcaggaactattgctagtgaggccaacacttacttgaattccaagagcacacrgtcttcagtgaagctgcagggcacttccaaaattgatgatatctggaaccttgaagtaaaagaaaattttgctggagaagccacactccaacgcatatat

SEQ ID NO: 2920 - DNA, 201 bp, Homo sapiens
cctaggttctgacgtccgtgtgccttcatacacattaatcctgccatcattagagctgccagtccttcatgtccctagaaatctcaagctttctcttccasatttcaaggaattgtgtaccataagccatatttttattcctgccatgggcaatattacctatgatttctcctttaaatcaagtgtcatcacactgaatac

SEQ ID NO: 2921 - DNA, 201 bp, Homo sapiens
gcaagtaagtgctaggttcaatcagtataagtacaaccaaaatttctctgctggaaacaacgagaacattatggaggcccatgtaggaataaatggagaarcaaatctggatttcttaaacattcctttaacaattcctgaaatgcgtctaccttacacaataatcacaactcctccactgaaagatttctctctatggga

SEQ ID NO: 2922 - DNA, 201 bp, Homo sapiens
ttgttgcttttgtaaagtatgataaaaaccaagatgttcactccattaacctcccattttttgagaccttgcaagaatattttgagaggaatcgacaaacmattatagttgtactggaaaacgtacagagaaacctgaagcacatcaatattgatcaatttgtaagaaaatacagagcagccctgggaaaactcccacagc

SEQ ID NO: 2923 - DNA, 201 bp, Homo sapiens
gaagttgatgtgttaacaaaatattctcaaccagaagactccttgattcccttttttgagataaccgtgcctgaatctcagttaactgtgtcccagttcaygcttccaaaaagtgtttcagatggcattgctgctttggatctaaatgcagtagccaacaagatcgcagactttgagttgcccaccatcatcgtgcctgag

SEQ ID NO: 2924 - DNA, 201 bp, Homo sapiens
agataccaaaaaaatgacttccaatttccctgtggatctctccgattatcctaagagcttgcatatgtatgctaatagactcctggatcacagagtccctsaaacagacatgactttccggcacgtgggttccaaattaatagttgcaatgagctcatggcttcagaaggcatctgggagtcttccttatacccagacttt

SEQ ID NO: 2925 - DNA, 201 bp, Homo sapiens
caaggatttttcccagacagtgtcaacaaagctttgtactgggttaatggtcaagttcctgatggtgtctctaaggtcttagtggaccactttggctatamcaaagatgataaacatgagcaggatatggtaaatggaataatgctcagtgttgagaagctgattaaagatttgaaatccaaagaagtcccggaagccaga

SEQ ID NO: 2926 - DNA, 201 bp, Homo sapiens
atcacggagttactgaaaaagctgcaatcaaccacagtcatgaacccctacatgaagcttgctccaggagaacttactatcatcctctaattttttaaaakaaatcttcatttattcttcttttccaattgaactttcacatagcacagaaaaaattcaaactgcctatattgcacatatgaactggacctgcaccaaagc

SEQ ID NO: 2927 - DNA, 201 bp, Homo sapiens
tattcaggaatatcttagcatccttaccgatccagatggaaaagggaaagagaagattgcagagctttctgccactgctcaggaaataattaaaagccagrccattgcgacgaagaaaataatttctgattaccaccagcagtttagatataaactgcaagatttttcagaccaactctctgattactatgaaaaatttat

SEQ ID NO: 2928 - DNA, 201 bp, Homo sapiens
ttccctctgggagcacagtacgaaaaaccacttacagctagagggcctctttttcaccaacggagaacatacaagcaaagccaccctggaactctctccayggcaaatgtcagctcttgttcaggtccatgcaagtcagcccagttccttccatgatttccctgaccttggccaggaagtggccctgaatgctaacactaa

SEQ ID NO: 2929 - DNA, 201 bp, Homo sapiens
ttcattttccaactaatagaagataacattaaacagctgaaagagatgaaatttacttatcttattaattatatccaagatgagatcaacacaatcttcartgattatatcccatatgtttttaaattgttgaaagaaaacctatgccttaatcttcataagttcaatgaatttattcaaaacgagcttcaggaagcttct

SEQ ID NO: 2930 - DNA, 201 bp, Homo sapiens
ctgatgatccagaaagctgccatccaggctctgcggaaaatggagcctaaagacaaggaccaggaggttcttcttcagactttccttgatgatgcttctcygggagataagcgactggctgcctatcttatgttgatgaggagtccttcacaggcagatattaacaaaattgtccaaattctaccatgggaacagaatgag

SEQ ID NO: 2931 - DNA, 114 bp, Homo sapiens
attcccaccgggasctgcggggctgagtgcccttctcggttgctgccgctgaggagcccgcccagccagccagggccgcgaggccgaggccaggccgcagcccaggagccgccc

SEQ ID NO: 2932 - DNA, 201 bp, Homo sapiens
gtcatctaccaaaggagatgtcaagggttcggttctttctcgggaatattcaggaactattgctagtgaggccaacacttacttgaattccaagagcacayggtcttcagtgaagctgcagggcacttccaaaattgatgatatctggaaccttgaagtaaaagaaaattttgctggagaagccacactccaacgcatata

SEQ ID NO: 2933 - DNA, 201 bp, Homo sapiens
gagcacacggtcttcagtgaagctgcagggcacttccaaaattgatgatatctggaaccttgaagtaaaagaaaattttgctggagaagccacactccaaygcatatattccctctgggagcacagtacgaaaaaccacttacagctagagggcctctttttcaccaacggagaacatacaagcaaagccaccctggaact

SEQ ID NO: 2934 - DNA, 201 bp, Homo sapiens
aactttgccacttctaacaagatggatatgaccttctctaagcaaaatgcactgctgcgttctgaatatcaggctgattacgagtcattgaggttcttcascctgctttctggatcactaaattcccatggtcttgagttaaatgctgacatcttaggcactgacaaaattaatagtggtgctcacaaggcgacactaagg

SEQ ID NO: 2935 - DNA, 201 bp, Homo sapiens
gtctccattcaccatagagatgtcggcattcggctatgtgttcccaaaagcagtcagcatgcctagtttctccatcctaggttctgacgtccgtgtgcctycatacacattaatcctgccatcattagagctgccagtccttcatgtccctagaaatctcaagctttctcttccagatttcaaggaattgtgtaccataag

SEQ ID NO: 2936 - DNA, 201 bp, Homo sapiens
taaaagaaaattttgctggagaagccacactccaacgcatatattccctctgggagcacagtacgaaaaaccacttacagctagagggcctctttttcacyaacggagaacatacaagcaaagccaccctggaactctctccatggcaaatgtcagctcttgttcaggtccatgcaagtcagcccagttccttccatgatt

SEQ ID NO: 2937 - DNA, 201 bp, Homo sapiens
cctgggactgctgattcaagaagtgccaccaggatcaactgcaaggttgagctggaggttccccagctctgcagcttcatcctgaagaccagccagtgcaycctgaaagaggtgtatggcttcaaccctgagggcaaagccttgctgaagaaaaccaagaactctgaggagtttgctgcagccatgtccaggtatgagctc

SEQ ID NO: 2938 - DNA, 201 bp, Homo sapiens
ctcacctcttacttttccattgagtcatctaccaaaggagatgtcaagggttcggttctttctcgggaatattcaggaactattgctagtgaggccaacayttacttgaattccaagagcacacggtcttcagtgaagctgcagggcacttccaaaattgatgatatctggaaccttgaagtaaaagaaaattttgctgga

SEQ ID NO: 2939 - DNA, 201 bp, Homo sapiens
agcacctagctggaaagttaaaacaacacattgaggctattgatgttagagtgcttttagatcaattgggaactacaatttcatttgaaagaataaatgaygttcttgagcatgtcaaacactttgttataaatcttattggggattttgaagtagctgagaaaatcaatgccttcagagccaaagtccatgagttaatcg

SEQ ID NO: 2940 - DNA, 201 bp, Homo sapiens
acaccagaatttaccatccttaacaccttccacattccttcctttacaattgactttgtagaaatgaaagtaaagatcatcagaaccattgaccagatgcwgaacagtgagctgcagtggcccgttccagatatatatctcagggatctgaaggtggaggacattcctctagcgagaatcaccctgccagacttccgttta

SEQ ID NO: 2941 - DNA, 201 bp, Homo sapiens
ccgatctccatctgcgctaccagaaagacaagaaaggcatctccacctcagcagcctccccagccgtaggcaccgtgggcatggatatggatgaagatgaygacttttctaaatggaacttctactacagccctcagtcctctccagataaaaaactcaccttaattgggaagaagaggcagcttctggcttgctaacctc

SEQ ID NO: 2942 - DNA, 201 bp, Homo sapiens
tcaaagacttaaaaaatataaaaatcccatccaggttttccacaccagaatttaccatccttaacaccttccacattccttcctttacaattgactttgtmgaaatgaaagtaaagatcatcagaaccattgaccagatgctgaacagtgagctgcagtggcccgttccagatatatatctcagggatctgaaggtggagg

SEQ ID NO: 2943 - DNA, 201 bp, Homo sapiens
atcaccctgccagacttccgtttaccagaaatcgcaattccagaattcataatcccaactctcaaccttaatgattttcaagttcctgaccttcacatacyagaattccagcttccccacatctcacacacaattgaagtacctacttttggcaagctatacagtattctgaaaatccaatctcctcttttcacattagat

SEQ ID NO: 2944 - DNA, 201 bp, Homo sapiens
tcaacgatacctgtctctggtaggccaggtttatagcacacttgtcacctacatttctgattggtggactcttgctgctaagaaccttactgactttgcaragcaatattctatccaagattgggctaaacgtatgaaagcattggtagagcaagggttcactgttcctgaaatcaagaccatccttgggaccatgcctgc

SEQ ID NO: 2945 - DNA, 201 bp, Homo sapiens
caggaactattgctagtgaggccaacacttacttgaattccaagagcacacggtcttcagtgaagctgcagggcacttccaaaattgatgatatctggaascttgaagtaaaagaaaattttgctggagaagccacactccaacgcatatattccctctgggagcacagtacgaaaaaccacttacagctagagggcctct

SEQ ID NO: 2946 - DNA, 201 bp, Homo sapiens
aagagtaaaccaaaacttggtttatgaatctggctccctcaacttttctaaacttgaaattcaatcacaagtcgattcccagcatgtgggccacagtgttytaactgctaaaggcatggcactgtttggagaagggaaggcagagtttactgggaggcatgatgctcatttaaatggaaaggttattggaactttgaaaaa

SEQ ID NO: 2947 - DNA, 201 bp, Homo sapiens
aaggaattgtgtaccataagccatatttttattcctgccatgggcaatattacctatgatttctcctttaaatcaagtgtcatcacactgaataccaatgstgaactttttaaccagtcagatattgttgctcatctcctttcttcatcttcatctgtcattgatgcactgcagtacaaattagagggcaccacaagattg

SEQ ID NO: 2948 - DNA, 201 bp, Homo sapiens
tgcaggctgaactggtggcaaaaccctccgtgtctgtggagtttgtgacaaatatgggcatcatcattccggacttcgctaggagtggggtccagatgaayaccaacttcttccacgagtcgggtctggaggctcatgttgccctaaaagctgggaagctgaagtttatcattccttccccaaagagaccagtcaagctgc

SEQ ID NO: 2949 - DNA, 201 bp, Homo sapiens
gaacacaggcaccaatgtagataccaaaaaaatgacttccaatttccctgtggatctctccgattatcctaagagcttgcatatgtatgctaatagactcmtggatcacagagtccctcaaacagacatgactttccggcacgtgggttccaaattaatagttgcaatgagctcatggcttcagaaggcatctgggagtct

SEQ ID NO: 2950 - DNA, 201 bp, Homo sapiens
aatggttcagaaatactgttttcctatttccaagacctagtgattacacttcctttcgagttaaggaaacataaactaatagatgtaatctcgatgtatasggaactgttgaaagatttgtgctacgtaatcttcaggaccttttacaattcattttccaactaatagaagataacattaaacagctgaaagagatgaaat

SEQ ID NO: 2951 - DNA, 201 bp, Homo sapiens
ggcccagaatctgtaccaggaactgttgactcaggaaggccaagccagtttccagggactcaaggataacgtgtttgatggcttggtacgagttactcaaraattccatatgaaagtcaagcatctgattgactcactcattgattttctgaacttccccagattccagtttccggggaaacctgggatatacactaggga

SEQ ID NO: 2952 - DNA, 201 bp, Homo sapiens
gctcaccctgagagaagtgtcttcaaagctgagaagaaatctgcagaacaatgctgagtgggtttatcaaggggccattaggcaaattgatgatatcgacrtgaggttccagaaagcagccagtggcaccactgggacctaccaagagtggaaggacaaggcccagaatctgtaccaggaactgttgactcaggaaggcca

SEQ ID NO: 2953 - DNA, 201 bp, Homo sapiens
gcactggggatgaagattacacctatttgattctgcgggtcattggaaatatgggccaaaccatggagcagttaactccagaactcaagtcttcaatcctsaaatgtgtccaaagtacaaagccatcactgatgatccagaaagctgccatccaggctctgcggaaaatggagcctaaagacaaggaccaggaggttcttc

SEQ ID NO: 2954 - DNA, 201 bp, Homo sapiens
cagaatgagcaagtgaagaactttgtggcttcccatattgccaatatcttgaactcagaagaattggatatccaagatctgaaaaagttagtgaaagaagytctgaaagaatctcaacttccaactgtcatggacttcagaaaattctctcggaactatcaactctacaaatctgtttctcttccatcacttgacccagcc

SEQ ID NO: 2955 - DNA, 201 bp, Homo sapiens
ctttgagccaacattggaagctctttttgggaagcaaggatttttcccagacagtgtcaacaaagctttgtactgggttaatggtcaagttcctgatggtrtctctaaggtcttagtggaccactttggctataccaaagatgataaacatgagcaggatatggtaaatggaataatgctcagtgttgagaagctgattaa

SEQ ID NO: 2956 - DNA, 201 bp, Homo sapiens
ttctcctacaagaataagtatgggatggtagcacaagtgacacagactttgaaacttgaagacacaccaaagatcaacagccgcttctttggtgaaggtamtaagaagatgggcctcgcatttgagagcaccaaatccacatcacctccaaagcaggccgaagctgttttgaagactctccaggaactgaaaaaactaacc

SEQ ID NO: 2957 - DNA, 201 bp, Homo sapiens
ctccatccctgtaaaagttttggctgataaattcattattcctgggctgaaactaaatgatctaaattcagttcttgtcatgcctacgttccatgtcccayttacagatcttcaggttccatcgtgcaaacttgacttcagagaaatacaaatctataagaagctgagaacttcatcatttgccctcaacctaccaacact

SEQ ID NO: 2958 - DNA, 201 bp, Homo sapiens
aacattggaagctctttttgggaagcaaggatttttcccagacagtgtcaacaaagctttgtactgggttaatggtcaagttcctgatggtgtctctaagrtcttagtggaccactttggctataccaaagatgataaacatgagcaggatatggtaaatggaataatgctcagtgttgagaagctgattaaagatttgaa

SEQ ID NO: 2959 - DNA, 201 bp, Homo sapiens
taccacatgaaggctgactctgtggttgacctgctttcctacaatgtgcaaggatctggagaaacaacatatgaccacaagaatacgttcacactatcatrtgatgggtctctacgccacaaatttctagattcgaatatcaaattcagtcatgtagaaaaacttggaaacaacccagtctcaaaaggtttactaatattc

SEQ ID NO: 2960 - DNA, 201 bp, Homo sapiens
catccgcacaggcatcagcccacttgctctcatcaaaggcatgacccgccccttgtcaactctgatcagcagcagccagtcctgtcagtacacactggacrctaagaggaagcatgtggcagaagccatctgcaaggagcaacacctcttcctgcctttctcctacaagaataagtatgggatggtagcacaagtgacaca

SEQ ID NO: 2961 - DNA, 201 bp, Homo sapiens
catctcttctgctgccttatcagcaagctataaagcagacactgttgctaaggttcagggtgtggagtttagccatcggctcaacacagacatcgctgggstggcttcagccattgacatgagcacaaactataattcagactcactgcatttcagcaatgtcttccgttctgtaatggccccgtttaccatgaccatcga

SEQ ID NO: 2962 - DNA, 201 bp, Homo sapiens
tattcgaaagtccataatggttcagaaatactgttttcctatttccaagacctagtgattacacttcctttcgagttaaggaaacataaactaatagatgyaatctcgatgtatagggaactgttgaaagatttgtgctacgtaatcttcaggaccttttacaattcattttccaactaatagaagataacattaaacagc

SEQ ID NO: 2963 - DNA, 201 bp, Homo sapiens
ctttcaaattcctggatacactgttccagttgtcaatgttgaagtgtctccattcaccatagagatgtcggcattcggctatgtgttcccaaaagcagtcrgcatgcctagtttctccatcctaggttctgacgtccgtgtgccttcatacacattaatcctgccatcattagagctgccagtccttcatgtccctagaaa

SEQ ID NO: 2964 - DNA, 201 bp, Homo sapiens
catctcctttcttcatcttcatctgtcattgatgcactgcagtacaaattagagggcaccacaagattgacaagaaaaaggggattgaagttagccacagytctgtctctgagcaacaaatttgtggagggtagtcataacagtactgtgagcttaaccacgaaaaatatggaagtgtcagtggcaacaaccacaaaagcc

SEQ ID NO: 2965 - DNA, 201 bp, Homo sapiens
ccccagattccagtttccggggaaacctgggatatacactagggaggaactttgcactatgttcataagggaggtagggacggtactgtcccaggtatatwcgaaagtccataatggttcagaaatactgttttcctatttccaagacctagtgattacacttcctttcgagttaaggaaacataaactaatagatgtaat

SEQ ID NO: 2966 - DNA, 201 bp, Homo sapiens
aaggcagagtttactgggaggcatgatgctcatttaaatggaaaggttattggaactttgaaaaattctcttttcttttcagcccagccatttgagatcasggcatccacaaacaatgaagggaatttgaaagttcgttttccattaaggttaacagggaagatagacttcctgaataactatgcactgtttctgagtccc

SEQ ID NO: 2967 - DNA, 201 bp, Homo sapiens
agtacctacttttggcaagctatacagtattctgaaaatccaatctcctcttttcacattagatgcaaatgctgacatagggaatggaaccacctcagcamacgaagcaggtatcgcagcttccatcactgccaaaggagagtccaaattagaagttctcaattttgattttcaagcaaatgcacaactctcaaaccctaa

SEQ ID NO: 2968 - DNA, 201 bp, Homo sapiens
aaagcctacaggacaccaaaataaccttaatcatcaattggttacaggaggctttaagttcagcatctttggctcacatgaaggccaaattccgagagacyctagaagatacacgagaccgaatgtatcaaatggacattcagcaggaacttcaacgatacctgtctctggtaggccaggtttatagcacacttgtcacct

SEQ ID NO: 2969 - DNA, 201 bp, Homo sapiens
acaagttgaaggagactattcagaagctaagcaatgtcctacaacaagttaagataaaagattactttgagaaattggttggatttattgatgatgctgtsaagaagcttaatgaattatcttttaaaacattcattgaagatgttaacaaattccttgacatgttgataaagaaattaaagtcatttgattaccaccagt

SEQ ID NO: 2970 - DNA, 201 bp, Homo sapiens
gtgatgggtctctacgccacaaatttctagattcgaatatcaaattcagtcatgtagaaaaacttggaaacaacccagtctcaaaaggtttactaatattygatgcatctagttcctggggaccacagatgtctgcttcagttcatttggactccaaaaagaaacagcatttgtttgtcaaagaagtcaagattgatgggc

SEQ ID NO: 2971 - DNA, 201 bp, Homo sapiens
tgagaaaatcaatgccttcagagccaaagtccatgagttaatcgagaggtatgaagtagaccaacaaatccaggttttaatggataaattagtagagttgrcccaccaatacaagttgaaggagactattcagaagctaagcaatgtcctacaacaagttaagataaaagattactttgagaaattggttggatttattga

SEQ ID NO: 2972 - DNA, 201 bp, Homo sapiens
cgtgcctgaatctcagttaactgtgtcccagttcacgcttccaaaaagtgtttcagatggcattgctgctttggatctaaatgcagtagccaacaagatcrcagactttgagttgcccaccatcatcgtgcctgagcagaccattgagattccctccattaagttctctgtacctgctggaattgtcattccttcctttca

SEQ ID NO: 2973 - DNA, 201 bp, Homo sapiens
aataaccttaatcatcaattggttacaggaggctttaagttcagcatctttggctcacatgaaggccaaattccgagagaccctagaagatacacgagacygaatgtatcaaatggacattcagcaggaacttcaacgatacctgtctctggtaggccaggtttatagcacacttgtcacctacatttctgattggtggac

SEQ ID NO: 2974 - DNA, 201 bp, Homo sapiens
aaagtatgataaaaaccaagatgttcactccattaacctcccattttttgagaccttgcaagaatattttgagaggaatcgacaaaccattatagttgtastggaaaacgtacagagaaacctgaagcacatcaatattgatcaatttgtaagaaaatacagagcagccctgggaaaactcccacagcaagctaatgatta

SEQ ID NO: 2975 - DNA, 201 bp, Homo sapiens
tgaactggtggcaaaaccctccgtgtctgtggagtttgtgacaaatatgggcatcatcattccggacttcgctaggagtggggtccagatgaacaccaacytcttccacgagtcgggtctggaggctcatgttgccctaaaagctgggaagctgaagtttatcattccttccccaaagagaccagtcaagctgctcagtgg

SEQ ID NO: 2976 - DNA, 201 bp, Homo sapiens
aaaggagcagttgaccacaagcttagcttggaaagcctcacctcttacttttccattgagtcatctaccaaaggagatgtcaagggttcggttctttctcsggaatattcaggaactattgctagtgaggccaacacttacttgaattccaagagcacacggtcttcagtgaagctgcagggcacttccaaaattgatgat

SEQ ID NO: 2977 - DNA, 201 bp, Homo sapiens
cacatgcagctcaaccgtacagttcctagaatatgaactaaatgttttgggaacacacaaaatcgaagatggtacgttagcctctaagactaaaggaacayttgcacaccgtgacttcagtgcagaatatgaagaagatggcaaatatgaaggacttcaggaatgggaaggaaaagcgcacctcaatatcaaaagcccagc

SEQ ID NO: 2978 - DNA, 201 bp, Homo sapiens
ctgcatttcagcaatgtcttccgttctgtaatggccccgtttaccatgaccatcgatgcacatacaaatggcaatgggaaactcgctctctggggagaacrtactgggcagctgtatagcaaattcctgttgaaagcagaacctctggcatttactttctctcatgattacaaaggctccacaagtcatcatctcgtgtct

SEQ ID NO: 2979 - DNA, 201 bp, Homo sapiens
gcacctagctggaaagttaaaacaacacattgaggctattgatgttagagtgcttttagatcaattgggaactacaatttcatttgaaagaataaatgacrttcttgagcatgtcaaacactttgttataaatcttattggggattttgaagtagctgagaaaatcaatgccttcagagccaaagtccatgagttaatcga

SEQ ID NO: 2980 - DNA, 201 bp, Homo sapiens
cttgtcagagggatcctaacactggccggctcaatggagagtccaacctgaggtttaactcctcctacctccaaggcaccaaccagataacaggaagatawgaagatggaaccctctccctcacctccacctctgatctgcaaagtggcatcattaaaaatactgcttccctaaagtatgagaactacgagctgactttaa

SEQ ID NO: 2981 - DNA, 201 bp, Homo sapiens
aggtcgagctttccaatgaccaagaaaaggcacaccttgacattgcaggatccttagaaggacacctaaggttcctcaaaaatatcatcctaccagtctakgacaagagcttatgggatttcctaaagctggatgtaaccaccagcattggtaggagacagcatcttcgtgtttcaactgcctttgtgtacaccaaaaacc

SEQ ID NO: 2982 - DNA, 201 bp, Homo sapiens
tttgccttttggtggcaaatcctccagagatctaaagatgttagagactgttaggacaccagccctccacttcaagtctgtgggattccatctgccatctygagagttccaagtccctacttttaccattcccaagttgtatcaactgcaagtgcctctcctgggtgttctagacctctccacgaatgtctacagcaactt

SEQ ID NO: 2983 - DNA, 201 bp, Homo sapiens
ggaatattcaggaactattgctagtgaggccaacacttacttgaattccaagagcacacggtcttcagtgaagctgcagggcacttccaaaattgatgatmtctggaaccttgaagtaaaagaaaattttgctggagaagccacactccaacgcatatattccctctgggagcacagtacgaaaaaccacttacagctaga

SEQ ID NO: 2984 - DNA, 201 bp, Homo sapiens
agacagaagaagccaagcaagtgttgtttctggataccgtgtatggaaactgctccactcactttaccgtcaagacgaggaagggcaatgtggcaacagawatatccactgaaagagacctggggcagtgtgatcgcttcaagcccatccgcacaggcatcagcccacttgctctcatcaaaggcatgacccgccccttgt

SEQ ID NO: 2985 - DNA, 201 bp, Homo sapiens
ttcacactatcatgtgatgggtctctacgccacaaatttctagattcgaatatcaaattcagtcatgtagaaaaacttggaaacaacccagtctcaaaagktttactaatattcgatgcatctagttcctggggaccacagatgtctgcttcagttcatttggactccaaaaagaaacagcatttgtttgtcaaagaagtc

SEQ ID NO: 2986 - DNA, 201 bp, Homo sapiens
agacagcatcttcgtgtttcaactgcctttgtgtacaccaaaaaccccaatggctattcattctccatccctgtaaaagttttggctgataaattcattaytcctgggctgaaactaaatgatctaaattcagttcttgtcatgcctacgttccatgtcccatttacagatcttcaggttccatcgtgcaaacttgacttc

SEQ ID NO: 2987 - DNA, 201 bp, Homo sapiens
atgagcacaaactataattcagactcactgcatttcagcaatgtcttccgttctgtaatggccccgtttaccatgaccatcgatgcacatacaaatggcartgggaaactcgctctctggggagaacatactgggcagctgtatagcaaattcctgttgaaagcagaacctctggcatttactttctctcatgattacaaa

SEQ ID NO: 2988 - DNA, 201 bp, Homo sapiens
agtcagcccagttccttccatgatttccctgaccttggccaggaagtggccctgaatgctaacactaagaaccagaagatcagatggaaaaatgaagtccrgattcattctgggtctttccagagccaggtcgagctttccaatgaccaagaaaaggcacaccttgacattgcaggatccttagaaggacacctaaggttc

SEQ ID NO: 2989 - DNA, 201 bp, Homo sapiens
atttacaattgttgcttttgtaaagtatgataaaaaccaagatgttcactccattaacctcccattttttgagaccttgcaagaatattttgagaggaatygacaaaccattatagttgtactggaaaacgtacagagaaacctgaagcacatcaatattgatcaatttgtaagaaaatacagagcagccctgggaaaact

SEQ ID NO: 2990 - DNA, 201 bp, Homo sapiens
aagttagccacagctctgtctctgagcaacaaatttgtggagggtagtcataacagtactgtgagcttaaccacgaaaaatatggaagtgtcagtggcaamaaccacaaaagcccaaattccaattttgagaatgaatttcaagcaagaacttaatggaaataccaagtcaaaacctactgtctcttcctccatggaattt

SEQ ID NO: 2991 - DNA, 201 bp, Homo sapiens
cttgctgaagaaaaccaagaactctgaggagtttgctgcagccatgtccaggtatgagctcaagctggccattccagaagggaagcaggttttcctttacycggagaaagatgaacctacttacatcctgaacatcaagaggggcatcatttctgccctcctggttcccccagagacagaagaagccaagcaagtgttgtt

SEQ ID NO: 2992 - DNA, 201 bp, Homo sapiens
aaaaaagtatagaattacagaaaatgatatacaaattgcattagatgatgccaaaatcaactttaatgaaaaactatctcaactgcagacatatatgatayaatttgatcagtatattaaagatagttatgatttacatgatttgaaaatagctattgctaatattattgatgaaatcattgaaaaattaaaaagtcttga

SEQ ID NO: 2993 - DNA, 201 bp, Homo sapiens
tgcatcctggattcaaaatgtggatactaagtaccaaatcagaatccagatacaagaaaaactgcagcagcttaagagacacatacagaatatagacatcyagcacctagctggaaagttaaaacaacacattgaggctattgatgttagagtgcttttagatcaattgggaactacaatttcatttgaaagaataaatga

SEQ ID NO: 2994 - DNA, 201 bp, Homo sapiens
tatcttagcatccttaccgatccagatggaaaagggaaagagaagattgcagagctttctgccactgctcaggaaataattaaaagccaggccattgcgaygaagaaaataatttctgattaccaccagcagtttagatataaactgcaagatttttcagaccaactctctgattactatgaaaaatttattgctgaatcc

SEQ ID NO: 2995 - DNA, 201 bp, Homo sapiens
agctgcagtggcccgttccagatatatatctcagggatctgaaggtggaggacattcctctagcgagaatcaccctgccagacttccgtttaccagaaatygcaattccagaattcataatcccaactctcaaccttaatgattttcaagttcctgaccttcacataccagaattccagcttccccacatctcacacacaa

SEQ ID NO: 2996 - DNA, 201 bp, Homo sapiens
ggagagattgagcagtattctgtcagcgcaacctatgagctccagagagaggacagagccttggtggataccctgaagtttgtaactcaagcagaaggtgygaagcagactgaggctaccatgacattcaaatataatcggcagagtatgaccttgtccagtgaagtccaaattccggattttgatgttgacctcggaaca

SEQ ID NO: 2997 - DNA, 201 bp, Homo sapiens
cttctgatagatgtggtcacctacctggtggccctgatccccgagccctcagcacagcagctgcgagagatcttcaacatggcgagggatcagcgcagccragccaccttgtatgcgctgagccacgcggtcaacaactatcataagacaaaccctacagggacccaggagctgctggacattgctaattacctgatggaa

SEQ ID NO: 2998 - DNA, 201 bp, Homo sapiens
tgaggtgtccagccccatcactttacaagccttggttcagtgtggacagcctcagtgctccactcacatcctccagtggctgaaacgtgtgcatgccaacmcccttctgatagatgtggtcacctacctggtggccctgatccccgagccctcagcacagcagctgcgagagatcttcaacatggcgagggatcagcgcag

SEQ ID NO: 2999 - DNA, 201 bp, Homo sapiens
ggaggtagggacggtactgtcccaggtatattcgaaagtccataatggttcagaaatactgttttcctatttccaagacctagtgattacacttcctttcragttaaggaaacataaactaatagatgtaatctcgatgtatagggaactgttgaaagatttgtgctacgtaatcttcaggaccttttacaattcattttc

SEQ ID NO: 3000 - DNA, 201 bp, Homo sapiens
aagtcagcccagttccttccatgatttccctgaccttggccaggaagtggccctgaatgctaacactaagaaccagaagatcagatggaaaaatgaagtcyggattcattctgggtctttccagagccaggtcgagctttccaatgaccaagaaaaggcacaccttgacattgcaggatccttagaaggacacctaaggtt

SEQ ID NO: 3001 - DNA, 201 bp, Homo sapiens
ggaattgtcattccttcctttcaagcactgactgcacgctttgaggtagactctcccgtgtataatgccacttggagtgccagtttgaaaaacaaagcagrttatgttgaaacagtcctggattccacatgcagctcaaccgtacagttcctagaatatgaactaaatgttttgggaacacacaaaatcgaagatggtacg

SEQ ID NO: 3002 - DNA, 201 bp, Homo sapiens
tgcaaggatctggagaaacaacatatgaccacaagaatacgttcacactatcatgtgatgggtctctacgccacaaatttctagattcgaatatcaaattsagtcatgtagaaaaacttggaaacaacccagtctcaaaaggtttactaatattcgatgcatctagttcctggggaccacagatgtctgcttcagttcatt

SEQ ID NO: 3003 - DNA, 201 bp, Homo sapiens
aggcacctggaaactcaagacccaatttaacaacaatgaatacagccaggacttggatgcttacaacactaaagataaaattggcgtggagcttactggaygaactctggctgacctaactctactagactccccaattaaagtgccacttttactcagtgagcccatcaatatcattgatgctttagagatgagagatgc

SEQ ID NO: 3004 - DNA, 201 bp, Homo sapiens
cacagagtccctcaaacagacatgactttccggcacgtgggttccaaattaatagttgcaatgagctcatggcttcagaaggcatctgggagtcttccttrtacccagactttgcaagaccacctcaatagcctgaaggagttcaacctccagaacatgggattgccagacttccacatcccagaaaacctcttcttaaaa

SEQ ID NO: 3005 - DNA, 201 bp, Homo sapiens; identical to SEQ ID NO: 2912

SEQ ID NO: 3006 - DNA, 201 bp, Homo sapiens; identical to SEQ ID NO: 2913

SEQ ID NO: 3007 - DNA, 201 bp, Homo sapiens; identical to SEQ ID NO: 2914

SEQ ID NO: 3008 - DNA, 201 bp, Homo sapiens; identical to SEQ ID NO: 2915

SEQ ID NO: 3009 - DNA, 201 bp, Homo sapiens; identical to SEQ ID NO: 2916

SEQ ID NO: 3010 - DNA, 201 bp, Homo sapiens; identical to SEQ ID NO: 2917

SEQ ID NO: 3011 - DNA, 201 bp, Homo sapiens; identical to SEQ ID NO: 2918

SEQ ID NO: 3012 - DNA, 201 bp, Homo sapiens; identical to SEQ ID NO: 2919

SEQ ID NO: 3013 - DNA, 201 bp, Homo sapiens; identical to SEQ ID NO: 2920

SEQ ID NO: 3014 - DNA, 201 bp, Homo sapiens; identical to SEQ ID NO: 2921

SEQ ID NO: 3015 - DNA, 201 bp, Homo sapiens; identical to SEQ ID NO: 2922

SEQ ID NO: 3016 - DNA, 201 bp, Homo sapiens; identical to SEQ ID NO: 2923

SEQ ID NO: 3017 - DNA, 201 bp, Homo sapiens; identical to SEQ ID NO: 2924

SEQ ID NO: 3018 - DNA, 201 bp, Homo sapiens; identical to SEQ ID NO: 2925

SEQ ID NO: 3019 - DNA, 201 bp, Homo sapiens
atcacggagttactgaaaaagctgcaatcaaccacagtcatgaacccctacatgaagcttgctccaggagaacttactatcatcctctaattttttaaaakaaatcttcatttattcttcttttccaattgaactttcacatagcacagaaaaaattcaaactgcctatattgataaaaccatacagtgagccagccttgc

SEQ ID NO: 3020 - DNA, 201 bp, Homo sapiens; identical to SEQ ID NO: 2928

SEQ ID NO: 3021 - DNA, 201 bp, Homo sapiens; identical to SEQ ID NO: 2927

SEQ ID NO: 3022 - DNA, 114 bp, Homo sapiens; identical to SEQ ID NO: 2931

SEQ ID NO: 3023 - DNA, 201 bp, Homo sapiens; identical to SEQ ID NO: 2930

SEQ ID NO: 3024 - DNA, 201 bp, Homo sapiens; identical to SEQ ID NO: 2932

SEQ ID NO: 3025 - DNA, 201 bp, Homo sapiens; identical to SEQ ID NO: 2929

SEQ ID NO: 3026 - DNA, 201 bp, Homo sapiens; identical to SEQ ID NO: 2933

SEQ ID NO: 3027 - DNA, 201 bp, Homo sapiens; identical to SEQ ID NO: 2934

SEQ ID NO: 3028 - DNA, 201 bp, Homo sapiens; identical to SEQ ID NO: 2935

SEQ ID NO: 3029 - DNA, 201 bp, Homo sapiens; identical to SEQ ID NO: 2936

SEQ ID NO: 3030 - DNA, 201 bp, Homo sapiens; identical to SEQ ID NO: 2937

SEQ ID NO: 3031 - DNA, 201 bp, Homo sapiens; identical to SEQ ID NO: 2938

SEQ ID NO: 3032 - DNA, 201 bp, Homo sapiens; identical to SEQ ID NO: 2939

SEQ ID NO: 3033 - DNA, 201 bp, Homo sapiens; identical to SEQ ID NO: 2940

SEQ ID NO: 3034 - DNA, 201 bp, Homo sapiens
ccgatctccatctgcgctaccagaaagacaagaaaggcatctccacctcagcagcctccccagccgtaggcaccgtgggcatggatatggatgaagatgaygacttttctaaatggaacttctactacagccctcagtcctctccagataaaaaactcaccatattcaaaactgagttgagggtccgggaatctgatgagg

SEQ ID NO: 3035 - DNA, 201 bp, Homo sapiens; identical to SEQ ID NO: 2942

SEQ ID NO: 3036 - DNA, 201 bp, Homo sapiens; identical to SEQ ID NO: 2943

SEQ ID NO: 3037 - DNA, 201 bp, Homo sapiens; identical to SEQ ID NO: 2944

SEQ ID NO: 3038 - DNA, 201 bp, Homo sapiens; identical to SEQ ID NO: 2945

SEQ ID NO: 3039 - DNA, 201 bp, Homo sapiens; identical to SEQ ID NO: 2948

SEQ ID NO: 3040 - DNA, 201 bp, Homo sapiens; identical to SEQ ID NO: 2946

SEQ ID NO: 3041 - DNA, 201 bp, Homo sapiens; identical to SEQ ID NO: 2947

SEQ ID NO: 3042 - DNA, 201 bp, Homo sapiens
aatggttcagaaatactgttttcctatttccaagacctagtgattacacttcctttcgagttaaggaaacataaactaatagatgtaatctcgatgtatasggaactgttgaaagatttatcaaaagaagcccaagaggtatttaaagccattcagtctctcaagaccacagaggtgctacgtaatcttcaggacctttta

SEQ ID NO: 3043 - DNA, 201 bp, Homo sapiens; identical to SEQ ID NO: 2949

SEQ ID NO: 3044 - DNA, 201 bp, Homo sapiens; identical to SEQ ID NO: 2951

SEQ ID NO: 3045 - DNA, 201 bp, Homo sapiens; identical to SEQ ID NO: 2952

SEQ ID NO: 3046 - DNA, 201 bp, Homo sapiens; identical to SEQ ID NO: 2953

SEQ ID NO: 3047 - DNA, 201 bp, Homo sapiens; identical to SEQ ID NO: 2954

SEQ ID NO: 3048 - DNA, 201 bp, Homo sapiens; identical to SEQ ID NO: 2955

SEQ ID NO: 3049 - DNA, 201 bp, Homo sapiens; identical to SEQ ID NO: 2956

SEQ ID NO: 3050 - DNA, 201 bp, Homo sapiens; identical to SEQ ID NO: 2958

SEQ ID NO: 3051 - DNA, 201 bp, Homo sapiens; identical to SEQ ID NO: 2957

SEQ ID NO: 3052 - DNA, 201 bp, Homo sapiens; identical to SEQ ID NO: 2959

SEQ ID NO: 3053 - DNA, 201 bp, Homo sapiens; identical to SEQ ID NO: 2960

SEQ ID NO: 3054 - DNA, 201 bp, Homo sapiens; identical to SEQ ID NO: 2961

SEQ ID NO: 3055 - DNA, 201 bp, Homo sapiens
tattcgaaagtccataatggttcagaaatactgttttcctatttccaagacctagtgattacacttcctttcgagttaaggaaacataaactaatagatgyaatctcgatgtatagggaactgttgaaagatttatcaaaagaagcccaagaggtatttaaagccattcagtctctcaagaccacagaggtgctacgtaat

SEQ ID NO: 3056 - DNA, 201 bp, Homo sapiens; identical to SEQ ID NO: 2963

SEQ ID NO: 3057 - DNA, 201 bp, Homo sapiens; identical to SEQ ID NO: 2964

SEQ ID NO: 3058 - DNA, 201 bp, Homo sapiens; identical to SEQ ID NO: 2965

SEQ ID NO: 3059 - DNA, 201 bp, Homo sapiens; identical to SEQ ID NO: 2966

SEQ ID NO: 3060 - DNA, 201 bp, Homo sapiens; identical to SEQ ID NO: 2967

SEQ ID NO: 3061 - DNA, 201 bp, Homo sapiens; identical to SEQ ID NO: 2968

SEQ ID NO: 3062 - DNA, 201 bp, Homo sapiens; identical to SEQ ID NO: 2969

SEQ ID NO: 3063 - DNA, 201 bp, Homo sapiens; identical to SEQ ID NO: 2970

SEQ ID NO: 3064 - DNA, 201 bp, Homo sapiens; identical to SEQ ID NO: 2971

SEQ ID NO: 3065 - DNA, 201 bp, Homo sapiens; identical to SEQ ID NO: 2972

SEQ ID NO: 3066 - DNA, 201 bp, Homo sapiens; identical to SEQ ID NO: 2973

SEQ ID NO: 3067 - DNA, 201 bp, Homo sapiens; identical to SEQ ID NO: 2974

SEQ ID NO: 3068 - DNA, 201 bp, Homo sapiens; identical to SEQ ID NO: 2975

SEQ ID NO: 3069 - DNA, 201 bp, Homo sapiens; identical to SEQ ID NO: 2976

SEQ ID NO: 3070 - DNA, 201 bp, Homo sapiens; identical to SEQ ID NO: 2977

SEQ ID NO: 3071 - DNA, 201 bp, Homo sapiens; identical to SEQ ID NO: 2978

SEQ ID NO: 3072 - DNA, 201 bp, Homo sapiens; identical to SEQ ID NO: 2979

SEQ ID NO: 3073 - DNA, 201 bp, Homo sapiens; identical to SEQ ID NO: 2980

SEQ ID NO: 3074 - DNA, 201 bp, Homo sapiens; identical to SEQ ID NO: 2984

SEQ ID NO: 3075 - DNA, 201 bp, Homo sapiens; identical to SEQ ID NO: 2983

SEQ ID NO: 3076 - DNA, 201 bp, Homo sapiens; identical to SEQ ID NO: 2982

SEQ ID NO: 3077 - DNA, 201 bp, Homo sapiens; identical to SEQ ID NO: 2981

SEQ ID NO: 3078 - DNA, 201 bp, Homo sapiens; identical to SEQ ID NO: 2985

SEQ ID NO: 3079 - DNA, 201 bp, Homo sapiens; identical to SEQ ID NO: 2986

SEQ ID NO: 3080 - DNA, 201 bp, Homo sapiens; identical to SEQ ID NO: 2987

SEQ ID NO: 3081 - DNA, 201 bp, Homo sapiens; identical to SEQ ID NO: 2988

SEQ ID NO: 3082 - DNA, 201 bp, Homo sapiens; identical to SEQ ID NO: 2990

SEQ ID NO: 3083 - DNA, 201 bp, Homo sapiens; identical to SEQ ID NO: 2991

SEQ ID NO: 3084 - DNA, 201 bp, Homo sapiens; identical to SEQ ID NO: 2989

SEQ ID NO: 3085 - DNA, 201 bp, Homo sapiens; identical to SEQ ID NO: 2992

SEQ ID NO: 3086 - DNA, 201 bp, Homo sapiens; identical to SEQ ID NO: 2993

SEQ ID NO: 3087 - DNA, 201 bp, Homo sapiens; identical to SEQ ID NO: 2994

SEQ ID NO: 3088 - DNA, 201 bp, Homo sapiens; identical to SEQ ID NO: 2995

SEQ ID NO: 3089 - DNA, 201 bp, Homo sapiens; identical to SEQ ID NO: 2996

SEQ ID NO: 3090 - DNA, 201 bp, Homo sapiens; identical to SEQ ID NO: 2997

SEQ ID NO: 3091 - DNA, 201 bp, Homo sapiens; identical to SEQ ID NO: 2998

SEQ ID NO: 3092 - DNA, 201 bp, Homo sapiens
ggaggtagggacggtactgtcccaggtatattcgaaagtccataatggttcagaaatactgttttcctatttccaagacctagtgattacacttcctttcragttaaggaaacataaactaatagatgtaatctcgatgtatagggaactgttgaaagatttatcaaaagaagcccaagaggtatttaaagccattcagtc

SEQ ID NO: 3093 - DNA, 201 bp, Homo sapiens; identical to SEQ ID NO: 3000

SEQ ID NO: 3094 - DNA, 201 bp, Homo sapiens; identical to SEQ ID NO: 3001

SEQ ID NO: 3095 - DNA, 201 bp, Homo sapiens; identical to SEQ ID NO: 3002

SEQ ID NO: 3096 - DNA, 201 bp, Homo sapiens; identical to SEQ ID NO: 3003

SEQ ID NO: 3097 - DNA, 201 bp, Homo sapiens; identical to SEQ ID NO: 3004

SEQ ID NO: 3098 - DNA, 201 bp, Homo sapiens; identical to SEQ ID NO: 2912

SEQ ID NO: 3099 - DNA, 201 bp, Homo sapiens; identical to SEQ ID NO: 2913

SEQ ID NO: 3100 - DNA, 201 bp, Homo sapiens; identical to SEQ ID NO: 2914

SEQ ID NO: 3101 - DNA, 201 bp, Homo sapiens; identical to SEQ ID NO: 2915

SEQ ID NO: 3102 - DNA, 201 bp, Homo sapiens; identical to SEQ ID NO: 2916

SEQ ID NO: 3103 - DNA, 201 bp, Homo sapiens; identical to SEQ ID NO: 2917

SEQ ID NO: 3104 - DNA, 201 bp, Homo sapiens; identical to SEQ ID NO: 2918

SEQ ID NO: 3105 - DNA, 201 bp, Homo sapiens; identical to SEQ ID NO: 2919

SEQ ID NO: 3106 - DNA, 201 bp, Homo sapiens; identical to SEQ ID NO: 2920

SEQ ID NO: 3107 - DNA, 201 bp, Homo sapiens; identical to SEQ ID NO: 2921

SEQ ID NO: 3108 - DNA, 201 bp, Homo sapiens; identical to SEQ ID NO: 2922

SEQ ID NO: 3109 - DNA, 201 bp, Homo sapiens; identical to SEQ ID NO: 2923

SEQ ID NO: 3110 - DNA, 201 bp, Homo sapiens; identical to SEQ ID NO: 2924

SEQ ID NO: 3111 - DNA, 201 bp, Homo sapiens; identical to SEQ ID NO: 2925

SEQ ID NO: 3112 - DNA, 201 bp, Homo sapiens; identical to SEQ ID NO: 2926

SEQ ID NO: 3113 - DNA, 201 bp, Homo sapiens; identical to SEQ ID NO: 2928

SEQ ID NO: 3114 - DNA, 201 bp, Homo sapiens; identical to SEQ ID NO: 2927

SEQ ID NO: 3115 - DNA, 114 bp, Homo sapiens; identical to SEQ ID NO: 2931

SEQ ID NO: 3116 - DNA, 201 bp, Homo sapiens; identical to SEQ ID NO: 2930

SEQ ID NO: 3117 - DNA, 201 bp, Homo sapiens; identical to SEQ ID NO: 2932

SEQ ID NO: 3118 - DNA, 201 bp, Homo sapiens; identical to SEQ ID NO: 2929

SEQ ID NO: 3119 - DNA, 201 bp, Homo sapiens; identical to SEQ ID NO: 2933

SEQ ID NO: 3120 - DNA, 201 bp, Homo sapiens; identical to SEQ ID NO: 2934

SEQ ID NO: 3121 - DNA, 201 bp, Homo sapiens; identical to SEQ ID NO: 2935

SEQ ID NO: 3122 - DNA, 201 bp, Homo sapiens; identical to SEQ ID NO: 2936

SEQ ID NO: 3123 - DNA, 201 bp, Homo sapiens; identical to SEQ ID NO: 2937

SEQ ID NO: 3124 - DNA, 201 bp, Homo sapiens; identical to SEQ ID NO: 2938

SEQ ID NO: 3125 - DNA, 201 bp, Homo sapiens; identical to SEQ ID NO: 2939

SEQ ID NO: 3126 - DNA, 201 bp, Homo sapiens; identical to SEQ ID NO: 2940

SEQ ID NO: 3127 - DNA, 201 bp, Homo sapiens; identical to SEQ ID NO: 3034

SEQ ID NO: 3128 - DNA, 201 bp, Homo sapiens; identical to SEQ ID NO: 2942

SEQ ID NO: 3129 - DNA, 201 bp, Homo sapiens; identical to SEQ ID NO: 2943

SEQ ID NO: 3130 - DNA, 201 bp, Homo sapiens; identical to SEQ ID NO: 2944

SEQ ID NO: 3131 - DNA, 201 bp, Homo sapiens; identical to SEQ ID NO: 2945

SEQ ID NO: 3132 - DNA, 201 bp, Homo sapiens; identical to SEQ ID NO: 2948

SEQ ID NO: 3133 - DNA, 201 bp, Homo sapiens; identical to SEQ ID NO: 2946

SEQ ID NO: 3134 - DNA, 201 bp, Homo sapiens; identical to SEQ ID NO: 2947

SEQ ID NO: 3135 - DNA, 201 bp, Homo sapiens; identical to SEQ ID NO: 3042

SEQ ID NO: 3136 - DNA, 201 bp, Homo sapiens; identical to SEQ ID NO: 2949

SEQ ID NO: 3137 - DNA, 201 bp, Homo sapiens; identical to SEQ ID NO: 2951

SEQ ID NO: 3138 - DNA, 201 bp, Homo sapiens; identical to SEQ ID NO: 2952

SEQ ID NO: 3139 - DNA, 201 bp, Homo sapiens; identical to SEQ ID NO: 2953

SEQ ID NO: 3140 - DNA, 201 bp, Homo sapiens; identical to SEQ ID NO: 2954

SEQ ID NO: 3141 - DNA, 201 bp, Homo sapiens; identical to SEQ ID NO: 2955

SEQ ID NO: 3142 - DNA, 201 bp, Homo sapiens; identical to SEQ ID NO: 2956

SEQ ID NO: 3143 - DNA, 201 bp, Homo sapiens; identical to SEQ ID NO: 2958

SEQ ID NO: 3144 - DNA, 201 bp, Homo sapiens; identical to SEQ ID NO: 2957

SEQ ID NO: 3145 - DNA, 201 bp, Homo sapiens; identical to SEQ ID NO: 2959

SEQ ID NO: 3146 - DNA, 201 bp, Homo sapiens; identical to SEQ ID NO: 2960

SEQ ID NO: 3147 - DNA, 201 bp, Homo sapiens; identical to SEQ ID NO: 2961

SEQ ID NO: 3148 - DNA, 201 bp, Homo sapiens; identical to SEQ ID NO: 3055

SEQ ID NO: 3149 - DNA, 201 bp, Homo sapiens; identical to SEQ ID NO: 2963

SEQ ID NO: 3150 - DNA, 201 bp, Homo sapiens; identical to SEQ ID NO: 2964

SEQ ID NO: 3151 - DNA, 201 bp, Homo sapiens; identical to SEQ ID NO: 2965

SEQ ID NO: 3152 - DNA, 201 bp, Homo sapiens; identical to SEQ ID NO: 2966

SEQ ID NO: 3153 - DNA, 201 bp, Homo sapiens; identical to SEQ ID NO: 2967

SEQ ID NO: 3154 - DNA, 201 bp, Homo sapiens; identical to SEQ ID NO: 2968

SEQ ID NO: 3155 - DNA, 201 bp, Homo sapiens; identical to SEQ ID NO: 2969

SEQ ID NO: 3156 - DNA, 201 bp, Homo sapiens; identical to SEQ ID NO: 2970

SEQ ID NO: 3157 - DNA, 201 bp, Homo sapiens; identical to SEQ ID NO: 2971

SEQ ID NO: 3158 - DNA, 201 bp, Homo sapiens; identical to SEQ ID NO: 2972

SEQ ID NO: 3159 - DNA, 201 bp, Homo sapiens; identical to SEQ ID NO: 2973

SEQ ID NO: 3160 - DNA, 201 bp, Homo sapiens; identical to SEQ ID NO: 2974

SEQ ID NO: 3161 - DNA, 201 bp, Homo sapiens; identical to SEQ ID NO: 2975

SEQ ID NO: 3162 - DNA, 201 bp, Homo sapiens; identical to SEQ ID NO: 2976

SEQ ID NO: 3163 - DNA, 201 bp, Homo sapiens; identical to SEQ ID NO: 2977

SEQ ID NO: 3164 - DNA, 201 bp, Homo sapiens; identical to SEQ ID NO: 2978

SEQ ID NO: 3165 - DNA, 201 bp, Homo sapiens; identical to SEQ ID NO: 2979

SEQ ID NO: 3166 - DNA, 201 bp, Homo sapiens; identical to SEQ ID NO: 2980

SEQ ID NO: 3167 - DNA, 201 bp, Homo sapiens; identical to SEQ ID NO: 2984

SEQ ID NO: 3168 - DNA, 201 bp, Homo sapiens; identical to SEQ ID NO: 2983

SEQ ID NO: 3169 - DNA, 201 bp, Homo sapiens; identical to SEQ ID NO: 2982

SEQ ID NO: 3170 - DNA, 201 bp, Homo sapiens; identical to SEQ ID NO: 2981

SEQ ID NO: 3171 - DNA, 201 bp, Homo sapiens; identical to SEQ ID NO: 2985

SEQ ID NO: 3172 - DNA, 201 bp, Homo sapiens; identical to SEQ ID NO: 2986

SEQ ID NO: 3173 - DNA, 201 bp, Homo sapiens; identical to SEQ ID NO: 2987

SEQ ID NO: 3174 - DNA, 201 bp, Homo sapiens; identical to SEQ ID NO: 2988

SEQ ID NO: 3175 - DNA, 201 bp, Homo sapiens; identical to SEQ ID NO: 2990

SEQ ID NO: 3176 - DNA, 201 bp, Homo sapiens; identical to SEQ ID NO: 2991

SEQ ID NO: 3177 - DNA, 201 bp, Homo sapiens; identical to SEQ ID NO: 2989

SEQ ID NO: 3178 - DNA, 201 bp, Homo sapiens; identical to SEQ ID NO: 2992

SEQ ID NO: 3179 - DNA, 201 bp, Homo sapiens; identical to SEQ ID NO: 2993

SEQ ID NO: 3180 - DNA, 201 bp, Homo sapiens; identical to SEQ ID NO: 2994

SEQ ID NO: 3181 - DNA, 201 bp, Homo sapiens; identical to SEQ ID NO: 2995

SEQ ID NO: 3182 - DNA, 201 bp, Homo sapiens; identical to SEQ ID NO: 2996

SEQ ID NO: 3183 - DNA, 201 bp, Homo sapiens; identical to SEQ ID NO: 2997

SEQ ID NO: 3184 - DNA, 201 bp, Homo sapiens; identical to SEQ ID NO: 2998

SEQ ID NO: 3185 - DNA, 201 bp, Homo sapiens; identical to SEQ ID NO: 3092

SEQ ID NO: 3186 - DNA, 201 bp, Homo sapiens; identical to SEQ ID NO: 3000

SEQ ID NO: 3187 - DNA, 201 bp, Homo sapiens; identical to SEQ ID NO: 3001

SEQ ID NO: 3188 - DNA, 201 bp, Homo sapiens; identical to SEQ ID NO: 3002

SEQ ID NO: 3189 - DNA, 201 bp, Homo sapiens; identical to SEQ ID NO: 3003

SEQ ID NO: 3190 - DNA, 201 bp, Homo sapiens; identical to SEQ ID NO: 3004

SEQ ID NO: 3191 - DNA, 201 bp, Homo sapiens
ccttccatgtgaatgcacaggaagctgagatgaaccctggcatttggcctcttgtagtcttggctaaggaaattctaacgcaaaaatagctcttgctttgrcttaggtgtgaagacccagacaggactgcagagggccccagagtggagatcccacatatttcaaaaacatgcttttccaaacccaggctattcggcaagg

SEQ ID NO: 3192 - DNA, 201 bp, Homo sapiens
gctgagatgaaccctggcatttggcctcttgtagtcttggctaaggaaattctaacgcaaaaatagctcttgctttgacttaggtgtgaagacccagacakgactgcagagggccccagagtggagatcccacatatttcaaaaacatgcttttccaaacccaggctattcggcaaggaagttagtttttaatctctccac

SEQ ID NO: 3193 - DNA, 201 bp, Homo sapiens
gaccgcctttggaggcagaagagcagttccacccaataactctaatgcagcggaagatgacctgcccacagtggagcttcagggcgtggtgccccggggcrtcaacctgcaagagtttcttaatgtcacgagcgttcacctgttcaaggagagatgggacactaacaaggtggaccaccacactgacaagtatgaaaacaa

SEQ ID NO: 3194 - DNA, 201 bp, Homo sapiens
cagaaggtgtcatgaaatcaaggtccaacgttgacatggactttgaagtggaaaatgctgtgctgggaaaagacttcaagctctccatcaccttccggaavaacagccacaaccgttacaccatcacagcttatctctcagccaacatcaccttctacaccggggtcccgaaggcagaattcaagaaggagacgttcgacg

SEQ ID NO: 3195 - DNA, 201 bp, Homo sapiens
cgaaccagtcgaaacccagaaacagacacgtacattctcttcaatccttggtgtgaagatgatgctgtgtatctggacaatgagaaagaaagagaagagtwtgtcctgaatgacatcggggtaattttttatggagaggtcaatgacatcaagaccagaagctggagctatggtcagtttgaagatggcatcctggacact

SEQ ID NO: 3196 - DNA, 201 bp, Homo sapiens
agaggacaggtctgtgcggctgtccatccagtcttcccccaaatgtattgtggggaaattccgcatgtatgttgctgtctggactccctatggcgtacttygaaccagtcgaaacccagaaacagacacgtacattctcttcaatccttggtgtgaagatgatgctgtgtatctggacaatgagaaagaaagagaagagta

SEQ ID NO: 3197 - DNA, 201 bp, Homo sapiens
gtttcttaatgtcacgagcgttcacctgttcaaggagagatgggacactaacaaggtggaccaccacactgacaagtatgaaaacaacaagctgattgtcygcagagggcagtctttctatgtgcagattgacttcagtcgtccatatgaccccagaagggatctcttcagggtggaatacgtcattggtcgctacccaca

SEQ ID NO: 3198 - DNA, 201 bp, Homo sapiens
aggctgatttatggtcagaatttccctctgatatgtctagggtgtgatttaggtcagtagactgtgattcttagcaaaaaatgaacagtgataagtatacwgggggcaaaatcagaatggaatgctctggtctatataaccacatttctaagcctttgagactgttcctgagccttcagcactaacctatgagggtgagct

SEQ ID NO: 3199 - DNA, 201 bp, Homo sapiens
tgcagtgggaagaagtgtgccggccctgggtctctgggcatcggaagctgatagccagcatgagcagtgactccctgagacatgtgtatggcgagctggaygtgcagattcaaagacgaccttccatgtgaatgcacaggaagctgagatgaaccctggcatttggcctcttgtagtcttggctaaggaaattctaacgca

SEQ ID NO: 3200 - DNA, 201 bp, Homo sapiens
gtcagaaacttccaggaccgcctttggaggcagaagagcagttccacccaataactctaatgcagcggaagatgacctgcccacagtggagcttcagggcktggtgccccggggcgtcaacctgcaagagtttcttaatgtcacgagcgttcacctgttcaaggagagatgggacactaacaaggtggaccaccacactga

SEQ ID NO: 3201 - DNA, 201 bp, Homo sapiens
aaccatccctgagatcatcatcaaggtccgtggcactcaggtagttggttctgacatgactgtgacaattcagtttaccaatcctttaaaagaaaccctgygaaatgtctgggtacacctggatggtcctggagtaacaagaccaatgaagaagatgttccgtgaaatccggcccaactccaccgtgcagtgggaagaagt

SEQ ID NO: 3202 - DNA, 201 bp, Homo sapiens
ctaaccatccctgagatcatcatcaaggtccgtggcactcaggtagttggttctgacatgactgtgacaattcagtttaccaatcctttaaaagaaacccygcgaaatgtctgggtacacctggatggtcctggagtaacaagaccaatgaagaagatgttccgtgaaatccggcccaactccaccgtgcagtgggaagaa

SEQ ID NO: 3203 - DNA, 201 bp, Homo sapiens
aatacctggcctcatttaaaacaagacttcagattccccactcagccttttgggaataatagcacatgatttgggctctagaattccagtcccctttctcrgggtcaggttctaccctccatgtgagaatatttttcccaggactagagcacaacataatttttatttttggcaaagccagaaaaagatctttcattttgc

SEQ ID NO: 3204 - DNA, 201 bp, Homo sapiens
acaaattggaggagatggcatgatggatattactgatacttacaaattccaagaaggtcaagaagaagagagattggccctagaaactgccctgatgtacrgagctaaaaagcccctcaacacagaaggtgtcatgaaatcaaggtccaacgttgacatggactttgaagtggaaaatgctgtgctgggaaaagacttcaa

SEQ ID NO: 3205 - DNA, 201 bp, Homo sapiens
tcatttacattacagctaagaaagatggcactcatgtggtggaaaatgtggatgccacccacattgggaaattaattgtgaccaaacaaattggaggagayggcatgatggatattactgatacttacaaattccaagaaggtcaagaagaagagagattggccctagaaactgccctgatgtacggagctaaaaagcccc

SEQ ID NO: 3206 - DNA, 201 bp, Homo sapiens
tatagaaggactgcagccactgattctctcttgtccttcacatcacccatgttgagacctcagcttggcactcaggtgctgaagggtaatatggactcagscttgcaaatagccagtgctagttctgacccaaccacagaggatgctgacatcatttgtattatgttccaaggctactacagagaaggctgcctgctatgt

SEQ ID NO: 3207 - DNA, 201 bp, Homo sapiens
agctctccatcaccttccggaacaacagccacaaccgttacaccatcacagcttatctctcagccaacatcaccttctacaccggggtcccgaaggcagarttcaagaaggagacgttcgacgtgacgctggagcccttgtccttcaagaaagaggcggtgctgatccaagccggcgagtacatgggtcagctgctggaac

SEQ ID NO: 3208 - DNA, 201 bp, Homo sapiens
agggccccagagtggagatcccacatatttcaaaaacatgcttttccaaacccaggctattcggcaaggaagttagtttttaatctctccaccttccaaaragtgctaagcattagctttaattaagctctcatagctcataagagtaacagtcatcatttatcatcacaaatggctacatctccaaatatcagtgggctc

SEQ ID NO: 3209 - DNA, 201 bp, Homo sapiens
gctgggaaaagacttcaagctctccatcaccttccggaacaacagccacaaccgttacaccatcacagcttatctctcagccaacatcaccttctacaccrgggtcccgaaggcagaattcaagaaggagacgttcgacgtgacgctggagcccttgtccttcaagaaagaggcggtgctgatccaagccggcgagtacat

SEQ ID NO: 3210 - DNA, 201 bp, Homo sapiens
gacatcaagaccagaagctggagctatggtcagtttgaagatggcatcctggacacttgcctgtatgtgatggacagagcacaaatggacctctctggaakagggaatcccatcaaagtcagccgtgtggggtctgcaatggtgaatgccaaagatgacgaaggtgtcctcgttggatcctgggacaatatctatgcctat

SEQ ID NO: 3211 - DNA, 201 bp, Homo sapiens
actagagcacaacataatttttatttttggcaaagccagaaaaagatctttcattttgcacctgcagccaagcaaatgcctgccaaattttagatttaccwtgttagaagaggtggccccatattaacaaattgcatttgtgggaaacttaaccacctacaaggagataagaaagcaggtgcaacactcaagtctattgaa

SEQ ID NO: 3212 - DNA, 201 bp, Homo sapiens
tataataagcccaacaagttgaagaagctggcggatctagtgaccagatatatagaaggactgcagccactgattctctcttgtccttcacatcacccatkttgagacctcagcttggcactcaggtgctgaagggtaatatggactcagccttgcaaatagccagtgctagttctgacccaaccacagaggatgctgaca

SEQ ID NO: 3213 - DNA, 201 bp, Homo sapiens
tctggaagagggaatcccatcaaagtcagccgtgtggggtctgcaatggtgaatgccaaagatgacgaaggtgtcctcgttggatcctgggacaatatctrtgcctatggcgtccccccatcggcctggactggaagcgttgacattctattggaataccggagctctgagaatccagtccggtatggccaatgctgggtt

SEQ ID NO: 3214 - DNA, 201 bp, Homo sapiens
aaagacttcaagctctccatcaccttccggaacaacagccacaaccgttacaccatcacagcttatctctcagccaacatcaccttctacaccggggtccygaaggcagaattcaagaaggagacgttcgacgtgacgctggagcccttgtccttcaagaaagaggcggtgctgatccaagccggcgagtacatgggtcag

SEQ ID NO: 3215 - DNA, 201 bp, Homo sapiens
actggaagcgttgacattctattggaataccggagctctgagaatccagtccggtatggccaatgctgggtttttgctggtgtctttaacacatttttacratgccttggaataccagcaagaattgttaccaattatttctctgcccatgataatgatgccaatttgcaaatggacatcttcctggaagaagatgggaac

SEQ ID NO: 3216 - DNA, 201 bp, Homo sapiens
ggattcagtgtggaactaccactgctggaatgaagcatggatgacaaggcctgaccttcctgttggatttggaggctggcaagctgtggacagcacccccyaggaaaatagcgatggcatgtatcggtgtggccccgcctcggttcaagccatcaagcacggccatgtctgcttccaatttgatgcaccttttgtttttgc

SEQ ID NO: 3217 - DNA, 201 bp, Homo sapiens
ccacagtggagcttcagggcgtggtgccccggggcgtcaacctgcaagagtttcttaatgtcacgagcgttcacctgttcaaggagagatgggacactaamaaggtggaccaccacactgacaagtatgaaaacaacaagctgattgtccgcagagggcagtctttctatgtgcagattgacttcagtcgtccatatgacc

SEQ ID NO: 3218 - DNA, 201 bp, Homo sapiens
tggaatgaagcatggatgacaaggcctgaccttcctgttggatttggaggctggcaagctgtggacagcaccccccaggaaaatagcgatggcatgtatcrgtgtggccccgcctcggttcaagccatcaagcacggccatgtctgcttccaatttgatgcaccttttgtttttgcagaggtcaacagcgacctcatttac

SEQ ID NO: 3219 - DNA, 201 bp, Homo sapiens
atcaaggtccgtggcactcaggtagttggttctgacatgactgtgacaattcagtttaccaatcctttaaaagaaaccctgcgaaatgtctgggtacaccyggatggtcctggagtaacaagaccaatgaagaagatgttccgtgaaatccggcccaactccaccgtgcagtgggaagaagtgtgccggccctgggtctct

SEQ ID NO: 3220 - DNA, 201 bp, Homo sapiens
acaaggagataagaaagcaggtgcaacactcaagtctattgaataatgtagttttgtgatgcattttatagaatgtgtcacactgtggcctgatcagcagragccaatatcccttactttaaccctttctgggatgcaatactaggaagtaaagtgaagaatttatctctttagttagtgattatatttcacccatctctc

SEQ ID NO: 3221 - DNA, 201 bp, Homo sapiens
attctaacgcaaaaatagctcttgctttgacttaggtgtgaagacccagacaggactgcagagggccccagagtggagatcccacatatttcaaaaacatrcttttccaaacccaggctattcggcaaggaagttagtttttaatctctccaccttccaaagagtgctaagcattagctttaattaagctctcatagctca

SEQ ID NO: 3222 - DNA, 169 bp, Homo sapiens
ctttcccgagtccgtttgaggaagtccccgaggcgcacagagcaagcccacgcgagggcacctctggasgggagcgcctgcaggaccttgtaaagtcaaaaatgtcagaaacttccaggaccgcctttggaggcagaagagcagttccacccaataactctaatgcagc

SEQ ID NO: 3223 - DNA, 201 bp, Homo sapiens
ggatgttctggccaagcaaaagtccaccgtgctaaccatccctgagatcatcatcaaggtccgtggcactcaggtagttggttctgacatgactgtgacarttcagtttaccaatcctttaaaagaaaccctgcgaaatgtctgggtacacctggatggtcctggagtaacaagaccaatgaagaagatgttccgtgaaat

SEQ ID NO: 3224 - DNA, 201 bp, Homo sapiens
gccaacatcaccttctacaccggggtcccgaaggcagaattcaagaaggagacgttcgacgtgacgctggagcccttgtccttcaagaaagaggcggtgcwgatccaagccggcgagtacatgggtcagctgctggaacaagcgtccctgcacttctttgtcacagctcgcatcaatgagaccagggatgttctggccaag

SEQ ID NO: 3225 - DNA, 201 bp, Homo sapiens
attctctcttgtccttcacatcacccatgttgagacctcagcttggcactcaggtgctgaagggtaatatggactcagccttgcaaatagccagtgctagytctgacccaaccacagaggatgctgacatcatttgtattatgttccaaggctactacagagaaggctgcctgctatgtatttgcaaggctgatttatggt

SEQ ID NO: 3226 - DNA, 201 bp, Homo sapiens
tgttctggccaagcaaaagtccaccgtgctaaccatccctgagatcatcatcaaggtccgtggcactcaggtagttggttctgacatgactgtgacaattsagtttaccaatcctttaaaagaaaccctgcgaaatgtctgggtacacctggatggtcctggagtaacaagaccaatgaagaagatgttccgtgaaatccg

SEQ ID NO: 3227 - DNA, 201 bp, Homo sapiens
tgttggatttggaggctggcaagctgtggacagcaccccccaggaaaatagcgatggcatgtatcggtgtggccccgcctcggttcaagccatcaagcacrgccatgtctgcttccaatttgatgcaccttttgtttttgcagaggtcaacagcgacctcatttacattacagctaagaaagatggcactcatgtggtgga

SEQ ID NO: 3228 - DNA, 201 bp, Homo sapiens
ataaccacatttctaagcctttgagactgttcctgagccttcagcactaacctatgagggtgagctggtcccctctatatatacatcatacttaactttaytaagtaatctcacagcatttgccaagtctcccaatatccaattttaaaatgaaatgcattttgctagacagttaaactggcttaacttagtatattatta

SEQ ID NO: 3229 - DNA, 201 bp, Homo sapiens
ggagagatgggacactaacaaggtggaccaccacactgacaagtatgaaaacaacaagctgattgtccgcagagggcagtctttctatgtgcagattgacytcagtcgtccatatgaccccagaagggatctcttcagggtggaatacgtcattggtcgctacccacaggagaacaagggaacctacatcccagtgcctat

SEQ ID NO: 3230 - DNA, 201 bp, Homo sapiens
ggtctgcaatggtgaatgccaaagatgacgaaggtgtcctcgttggatcctgggacaatatctatgcctatggcgtccccccatcggcctggactggaagsgttgacattctattggaataccggagctctgagaatccagtccggtatggccaatgctgggtttttgctggtgtctttaacacatttttacgatgccttg

SEQ ID NO: 3231 - DNA, 201 bp, Homo sapiens
tggcatttggcctcttgtagtcttggctaaggaaattctaacgcaaaaatagctcttgctttgacttaggtgtgaagacccagacaggactgcagagggcyccagagtggagatcccacatatttcaaaaacatgcttttccaaacccaggctattcggcaaggaagttagtttttaatctctccaccttccaaagagtgc

SEQ ID NO: 3232 - DNA, 201 bp, Homo sapiens
ttctattggaataccggagctctgagaatccagtccggtatggccaatgctgggtttttgctggtgtctttaacacatttttacgatgccttggaataccmgcaagaattgttaccaattatttctctgcccatgataatgatgccaatttgcaaatggacatcttcctggaagaagatgggaacgtgaattccaaactca

SEQ ID NO: 3233 - DNA, 201 bp, Homo sapiens
aacgttgacatggactttgaagtggaaaatgctgtgctgggaaaagacttcaagctctccatcaccttccggaacaacagccacaaccgttacaccatcayagcttatctctcagccaacatcaccttctacaccggggtcccgaaggcagaattcaagaaggagacgttcgacgtgacgctggagcccttgtccttcaag

SEQ ID NO: 3234 - DNA, 201 bp, Homo sapiens
caacagccacaaccgttacaccatcacagcttatctctcagccaacatcaccttctacaccggggtcccgaaggcagaattcaagaaggagacgttcgacrtgacgctggagcccttgtccttcaagaaagaggcggtgctgatccaagccggcgagtacatgggtcagctgctggaacaagcgtccctgcacttctttgt

SEQ ID NO: 3235 - DNA, 201 bp, Homo sapiens
tttaacacatttttacgatgccttggaataccagcaagaattgttaccaattatttctctgcccatgataatgatgccaatttgcaaatggacatcttccyggaagaagatgggaacgtgaattccaaactcaccaaggattcagtgtggaactaccactgctggaatgaagcatggatgacaaggcctgaccttcctgtt

SEQ ID NO: 3236 - DNA, 201 bp, Homo sapiens
gacatcaagaccagaagctggagctatggtcagtttgaagatggcatcctggacacttgcctgtatgtgatggacagagcacaaatggacctctctggaakagggaatcccatcaaagtcagccgtgtggggtctgcaatgggctttctcacttacgaagtgggtattgattctttgcaggatcctgtgtgcctggtcata

SEQ ID NO: 3237 - DNA, 201 bp, Homo sapiens; identical to SEQ ID NO: 3232

SEQ ID NO: 3238 - DNA, 201 bp, Homo sapiens; identical to SEQ ID NO: 3215

SEQ ID NO: 3239 - DNA, 141 bp, Homo sapiens
ggagcctcacctcaggggggctacagttttgcacagagcggccccactgttgacgccaacagaggccatggtctgagctccttagctgttcaggagagggmtggggactcaggaacctcagaagggcagagcagggcagag

SEQ ID NO: 3240 - DNA, 201 bp, Homo sapiens
ttaactgcagtttgggatggaggtggtgctcagcttttatataaagggggaagcaagtatgatgctgtgtatctggacaatgagaaagaaagagaagagtwtgtcctgaatgacatcggggtaattttttatggagaggtcaatgacatcaagaccagaagctggagctatggtcagtttgaagatggcatcctggacact

SEQ ID NO: 3241 - DNA, 201 bp, Homo sapiens
agaggacaggtctgtgcggctgtccatccagtcttcccccaaatgtattgtggggaaattccgcatgtatgttgctgtctggactccctatggcgtacttygaaccagtcgaaacccagaaacagacacgtacattctcttcaatccttggtgtgaagggatttctgacttcatggctgcctctgcctctaggagtcctac

SEQ ID NO: 3242 - DNA, 201 bp, Homo sapiens
ttcactgtgacacacctacatgtaccacctccatccatatttgctccagtgaatgccaaagatgacgaaggtgtcctcgttggatcctgggacaatatctrtgcctatggcgtccccccatcggcctggactggaagcgttgacattctattggaataccggagctctgagaatccagtccggtatggccaatgctgggtt

SEQ ID NO: 3243 - DNA, 201 bp, Homo sapiens
tttaacacatttttacgatgccttggaataccagcaagaattgttaccaattatttctctgcccatgataatgatgccaatttgcaaatggacatcttccyggaagaagatgggaacgtgaattccaaactcaccaaggattcagtgtgcaaggatctcaggagctattggcctcatacttacctccctccacaggctctg

SEQ ID NO: 3244 - DNA, 201 bp, Homo sapiens
taggagtcctactcacacttgtgctgctgcaagtgagaaacttgaccgtcaccttcaatttcaatgttggcaacaacaacaaaagcagccacacacaacayctgtgaatgcccagaccttaactgcagtttgggatggaggtggtgctcagcttttatataaagggggaagcaagtatgatgctgtgtatctggacaatga

SEQ ID NO: 3245 - DNA, 201 bp, Homo sapiens
gaaatagcacatagatctcagttcatccccaggatctggcagcaactatgggcagagaatttcccccaaggagatgcagctgcttctgcaaaggctgccgytactgcagataaaggctcgttattcactgtgacacacctacatgtaccacctccatccatatttgctccagtgaatgccaaagatgacgaaggtgtcctc

SEQ ID NO: 3246 - DNA, 201 bp, Homo sapiens
tatttgctccagtgaatgccaaagatgacgaaggtgtcctcgttggatcctgggacaatatctatgcctatggcgtccccccatcggcctggactggaagsgttgacattctattggaataccggagctctgagaatccagtccggtatggccaatgctgggtttttgctggtgtctttaacacatttttacgatgccttg

SEQ ID NO: 3247 - DNA, 201 bp, Homo sapiens
gaaaatcaaatttaatgcattagtcatcttaaaaatgtccctttttttcatttctttgacattttactatattttatgctacatctcacaaaaaaaaaaaaggtgtttaaacaaaaagccaaggagaagttgtggtttgattttgttgaattcacctttaaagtaggtttacaaatgtgaatcatgcaggcaggcctactc

SEQ ID NO: 3248 - DNA, 201 bp, Homo sapiens
gctcctttgtcccaaccaacaccaaacaagctctgtcaaacatgctacagcggcgctcaggcgccatgatgcagccgccttctcttcatgcaatcacatcrcagcagcagttgatacagatgaagcttctgcagcagcagcagcaacagcgacttctcaggcaagcccagactcggcctttccaacagggccagccggggg

SEQ ID NO: 3249 - DNA, 201 bp, Homo sapiens
tttgctgtcttaaaagcaattatgatgcttggagatgccaaaattggcaataacagtgtcagctctttaaagaatgatgacttcaccatgagaggtttgcratgtgatgggaatgctgatgatatctggactgcctcacaaaatccaaaatcctgtgggaaaagcatttccatagaaactgccaatttaagagaatacgct

SEQ ID NO: 3250 - DNA, 201 bp, Homo sapiens
gccctctggtgggcgggggaattgatgctgtgctgacttctgcacatccaaaccttccctccgtgcccctgcctcaggatcccatgagacccagacagccrcaagttcgacagcagcagagactcctccagatgcagcagccccagcagccccagccccagcagcctccccagccccagcagtcctcgcagtcccagagtc

SEQ ID NO: 3251 - DNA, 201 bp, Homo sapiens
gagaacaagcgtgcatacatgaatttagtaaagaaactgaaaaaagagctaggagacaagcgatcagaaagtattgacaaagttcgacagttactaccttwgccgaaacagacatgtgatgtcatcacttgtgaacctatgggttccttgattgacacaaaaggaaacaaaattgctggatttgactctatagataaaaaa

SEQ ID NO: 3252 - DNA, 201 bp, Homo sapiens
tttgtaatctcataagcactttataaactttgttcttatttatgtaggactcttctttgcttttgttgtggtcaaaaggtgctgaaacagattgttgcttmgtacttaaacttcttaaaccaagaacctaaaccaaggtttctttgagagccgccctaagatgtgcggaaacctgttagaagtagctgtactcaaatttgt

SEQ ID NO: 3253 - DNA, 201 bp, Homo sapiens
gtctctacgaagcagaaggtgtccccgtgggacttgtttgagggtcagaagaacccagctcctttgtcctgggcctggtttgggacagtccgagtggaccraagagtgatcaagtacgaggagcagcatcacctcctgctgtatcacacacaccccatgcccaagccccgcagttactacctccagccactgcccctgcct

SEQ ID NO: 3254 - DNA, 201 bp, Homo sapiens
caggctctacagcagagccctctggtgggcgggggaattgatgctgtgctgacttctgcacatccaaaccttccctccgtgcccctgcctcaggatcccakgagacccagacagccgcaagttcgacagcagcagagactcctccagatgcagcagccccagcagccccagccccagcagcctccccagccccagcagtcc

SEQ ID NO: 3255 - DNA, 201 bp, Homo sapiens
atgctgtgctgacttctgcacatccaaaccttccctccgtgcccctgcctcaggatcccatgagacccagacagccgcaagttcgacagcagcagagactyctccagatgcagcagccccagcagccccagccccagcagcctccccagccccagcagtcctcgcagtcccagagtcagacccttggtctccaagcaatgc

SEQ ID NO: 3256 - DNA, 201 bp, Homo sapiens
gcctggcaggaagttatacaacaggactgtgtgtctgcatcgtggctgttctcaggcgctatcacagttgtctaatcttgaatcctgatcagacagcccasgtgtttgaagggttgtgtggtgtggtcaagcatgtcgtaaacccctcagaatgttcttcccctgaaagatgcattttagcctacctctatgatctctatg

SEQ ID NO: 3257 - DNA, 201 bp, Homo sapiens
ctagctcaagagttgatgaatatccacagagcaacatataccgagtgcctcctaattactcgcctatctcctcccaaatgatgcaccatccacagtccacsttgtggggttacaacctcgtgggccagccccagcagcccggctttttccttcagaaccaatctcttactccaggtggctccagattggaccctgcaggct

SEQ ID NO: 3258 - DNA, 201 bp, Homo sapiens
cagcagcaggcctcgccgtacctgcagcccctgactggctctcagagactgaaccatcaggctctacagcagagccctctggtgggcgggggaattgatgmtgtgctgacttctgcacatccaaaccttccctccgtgcccctgcctcaggatcccatgagacccagacagccgcaagttcgacagcagcagagactcctc

SEQ ID NO: 3259 - DNA, 201 bp, Homo sapiens
cgaacttgcgatgggatccagacttcatgatggattttattgagaatccctcagcccgcagcatcaactactcaatgctgggcaagatcctcagtgacaaygcggccaatcgctacagctttgtctgcaatacactcatgaatgtatgtatgggccatcaggatgctggcaggattaacgacatagccaatttctcctctg

SEQ ID NO: 3260 - DNA, 201 bp, Homo sapiens
agaccatgccacagggctatacaatgtatgggacacagatgcctttgcagcagacatcgcagcagcaggctggcagtgtggtcctgtctcccagctataaytccagagcctatccggccgcacattccaaccccgtgctaatggaaagactcagacagattcagcagcagccgagtggctatgttcagcagcaggcctcgc

SEQ ID NO: 3261 - DNA, 201 bp, Homo sapiens
ctttcattgctattctgatagcacgacagtgtttttccctggaggacgtcgtgcagcatgtcgcacttccctctcttctagcagcagcttgtggggatgcsgacgccgagcctggggcgagaatgacatgccgactcttgcttcatctcttccgagctccccaggcctgcttcttacctcaagcaacgggcaaacctttcc

SEQ ID NO: 3262 - DNA, 201 bp, Homo sapiens
ttgaaattggtgctttttttgaatctcacatttctagaaagaatggattatgatggatctaaggtatttatgtatttcattcattaatgatgacgttgttkttttttttttaattttattttccaaactgtgctggaccaaactactgatttgaaaggcatgtcagatcttgacagaaacatggcctgtttattctgcatt

SEQ ID NO: 3263 - DNA, 201 bp, Homo sapiens
ctgcagactcttcaggagagactgcatgaagcggatgccactctgaagagagagcaggagagctataaacagatgcagagcgagtttgctgcacgccttartaaagtggaaatggaacgtcagaatttagcagaagcaattacactggccgaaagaaaatactcagatgagaagaagagggttgatgaactgcagcagcaa

SEQ ID NO: 3264 - DNA, 201 bp, Homo sapiens
gacaataatttaacaagctcagctctgctttatctgagtttagtggtcctaatatatatgtagagaaagatggtggggttgttcacctctgtacagaccawctgtatgttaggtgacattgattatgggttataatcagggaaactaattgtatttagtgacaaaaataaaaagtttttttttataattcagtctgctttt

SEQ ID NO: 3265 - DNA, 201 bp, Homo sapiens
ggggttgttcacctctgtacagaccatctgtatgttaggtgacattgattatgggttataatcagggaaactaattgtatttagtgacaaaaataaaaagtttttttttataattcagtctgcttttggattttcatatatttaactttgcaaaaagatttactttgtacatgttacaggcttgattggtgtaaatctttt

SEQ ID NO: 3266 - DNA, 201 bp, Homo sapiens
ttactccaaagatccaaagagactcaagaagaattaaacaaagcaagagcaagagttgaaaagtggaatgctgaccattcaaagagtgatcgaatgactcraggactccgagcccaagtagatgacctgactgaagctgtggctgcaaaggattcccagctggctgtactgaaagtgagactccaggaagctgaccagcta

SEQ ID NO: 3267 - DNA, 201 bp, Homo sapiens
ttcctttaaatggtaagagtttctaaaacagacaataatttaacaagctcagctctgctttatctgagtttagtggtcctaatatatatgtagagaaagawggtggggttgttcacctctgtacagaccatctgtatgttaggtgacattgattatgggttataatcagggaaactaattgtatttagtgacaaaaataaa

SEQ ID NO: 3268 - DNA, 201 bp, Homo sapiens
tactcgcacagaagcattagaagccttacagagtgaaaaatcacgaataatgcaggatcaaagtgaaggtaacagcctgcagaatcaagctctgcagactyttcaggagagactgcatgaagcggatgccactctgaagagagagcaggagagctataaacagatgcagagcgagtttgctgcacgccttaataaagtgga

SEQ ID NO: 3269 - DNA, 201 bp, Homo sapiens
gtttgattttcttaatagttcacagaaggagcctaccgggagggtggaaatcagaaaggaaaaaggcaagacacctgtctttcagagctctcagacatcargtgtcagttctgtgaaccccagtgtaaccaccatcaaaaccattgaagaaaattcttttgggagccaaacccacgaagctgccagtaactcagattctag

SEQ ID NO: 3270 - DNA, 201 bp, Homo sapiens
tagagacagaactggagcgactgaagcaggagttccactatatagaagaagatctttatcgaacaaagaacacattgcaaagcagaattaaagatcgagaygaagaaattcaaaaactcaggaatcagcttaccaataaaactttaagcaatagcagtcagtctgagttagaaaatcgactccatcagctaacagagactc

SEQ ID NO: 3271 - DNA, 201 bp, Homo sapiens
aacatatatagcaaaaatactgactatactgaacttcaccagcaaaatacagatttgatatatcagactggacctaaatctacgtatatttcatcagcagstgataacattcgaaatcaaaaagccaccatcttagctggcactgcaaatgtgaaagtaggatctcggacaccagtagaggcctctcatcctgttgaaaat

SEQ ID NO: 3272 - DNA, 201 bp, Homo sapiens
ctctggttttgaaggcctagatagcagcactgccagtagcatggagctggaagaacttcggcatgagaaagagatgcagagggaggaaatacagaagctgrtgggccagatacatcagctcagatccgaattacaggatatggaggcacagcaagttaatgaagcagaatcagcaagagaacagttacaggatctgcatga

SEQ ID NO: 3273 - DNA, 201 bp, Homo sapiens
actgcaatctaaggaaaaattgattaacagcttgaaagaaggctctggttttgaaggcctagatagcagcactgccagtagcatggagctggaagaacttyggcatgagaaagagatgcagagggaggaaatacagaagctgatgggccagatacatcagctcagatccgaattacaggatatggaggcacagcaagttaa

SEQ ID NO: 3274 - DNA, 201 bp, Homo sapiens
gggcgagcggctgcgcgcgcggatggaggagatgggcagccggacccgcgaccgcctggacgaggtgaaggagcaggtggcggaggtgcgcgccaagctgraggagcaggcccagcagatacgcctgcaggccgaggccttccaggcccgcctcaagagctggttcgagcccctggtggaagacatgcagcgccagtgggc

SEQ ID NO: 3275 - DNA, 201 bp, Homo sapiens
ggaggaacaactgaccccggtggcggaggagacgcgggcacggctgtccaaggagctgcaggcggcgcaggcccggctgggcgcggacatggaggacgtgygcggccgcctggtgcagtaccgcggcgaggtgcaggccatgctcggccagagcaccgaggagctgcgggtgcgcctcgcctcccacctgcgcaagctgcg

SEQ ID NO: 3276 - DNA, 201 bp, Homo sapiens
gcgcggccgcctggtgcagtaccgcggcgaggtgcaggccatgctcggccagagcaccgaggagctgcgggtgcgcctcgcctcccacctgcgcaagctgygtaagcggctcctccgcgatgccgatgacctgcagaagcgcctggcagtgtaccaggccggggcccgcgagggcgccgagcgcggcctcagcgccatccg

SEQ ID NO: 3277 - DNA, 201 bp, Homo sapiens
gaggacgtgcgcggccgcctggtgcagtaccgcggcgaggtgcaggccatgctcggccagagcaccgaggagctgcgggtgcgcctcgcctcccacctgckcaagctgcgtaagcggctcctccgcgatgccgatgacctgcagaagcgcctggcagtgtaccaggccggggcccgcgagggcgccgagcgcggcctcagc

SEQ ID NO: 3278 - DNA, 201 bp, Homo sapiens
aggcaggaagatgaaggttctgtgggctgcgttgctggtcacattcctggcaggatgccaggccaaggtggagcaagcggtggagacagagccggagcccragctgcgccagcagaccgagtggcagagcggccagcgctgggaactggcactgggtcgcttttgggattacctgcgctgggtgcagacactgtctgagca

SEQ ID NO: 3279 - DNA, 201 bp, Homo sapiens
cgcggccgcctggtgcagtaccgcggcgaggtgcaggccatgctcggccagagcaccgaggagctgcgggtgcgcctcgcctcccacctgcgcaagctgcstaagcggctcctccgcgatgccgatgacctgcagaagcgcctggcagtgtaccaggccggggcccgcgagggcgccgagcgcggcctcagcgccatccgc

SEQ ID NO: 3280 - DNA, 201 bp, Homo sapiens
catgctcggccagagcaccgaggagctgcgggtgcgcctcgcctcccacctgcgcaagctgcgtaagcggctcctccgcgatgccgatgacctgcagaagygcctggcagtgtaccaggccggggcccgcgagggcgccgagcgcggcctcagcgccatccgcgagcgcctggggcccctggtggaacagggccgcgtgcg

SEQ ID NO: 3281 - DNA, 201 bp, Homo sapiens
atccgcgagcgcctggggcccctggtggaacagggccgcgtgcgggccgccactgtgggctccctggccggccagccgctacaggagcgggcccaggcctrgggcgagcggctgcgcgcgcggatggaggagatgggcagccggacccgcgaccgcctggacgaggtgaaggagcaggtggcggaggtgcgcgccaagctg

SEQ ID NO: 3282 - DNA, 201 bp, Homo sapiens
ctggcaggatgccaggccaaggtggagcaagcggtggagacagagccggagcccgagctgcgccagcagaccgagtggcagagcggccagcgctgggaacyggcactgggtcgcttttgggattacctgcgctgggtgcagacactgtctgagcaggtgcaggaggagctgctcagctcccaggtcacccaggaactgagg

SEQ ID NO: 3283 - DNA, 201 bp, Homo sapiens
ggtcacattcctggcaggatgccaggccaaggtggagcaagcggtggagacagagccggagcccgagctgcgccagcagaccgagtggcagagcggccagygctgggaactggcactgggtcgcttttgggattacctgcgctgggtgcagacactgtctgagcaggtgcaggaggagctgctcagctcccaggtcaccca

SEQ ID NO: 3284 - DNA, 201 bp, Homo sapiens
cggctgggcgcggacatggaggacgtgcgcggccgcctggtgcagtaccgcggcgaggtgcaggccatgctcggccagagcaccgaggagctgcgggtgcrcctcgcctcccacctgcgcaagctgcgtaagcggctcctccgcgatgccgatgacctgcagaagcgcctggcagtgtaccaggccggggcccgcgagggc

SEQ ID NO: 3285 - DNA, 201 bp, Homo sapiens
tccaaggagctgcaggcggcgcaggcccggctgggcgcggacatggaggacgtgcgcggccgcctggtgcagtaccgcggcgaggtgcaggccatgctcgrccagagcaccgaggagctgcgggtgcgcctcgcctcccacctgcgcaagctgcgtaagcggctcctccgcgatgccgatgacctgcagaagcgcctggca

SEQ ID NO: 3286 - DNA, 201 bp, Homo sapiens
ggaggacgtgcgcggccgcctggtgcagtaccgcggcgaggtgcaggccatgctcggccagagcaccgaggagctgcgggtgcgcctcgcctcccacctgygcaagctgcgtaagcggctcctccgcgatgccgatgacctgcagaagcgcctggcagtgtaccaggccggggcccgcgagggcgccgagcgcggcctcag

SEQ ID NO: 3287 - DNA, 201 bp, Homo sapiens
cggccgcctggtgcagtaccgcggcgaggtgcaggccatgctcggccagagcaccgaggagctgcgggtgcgcctcgcctcccacctgcgcaagctgcgtvagcggctcctccgcgatgccgatgacctgcagaagcgcctggcagtgtaccaggccggggcccgcgagggcgccgagcgcggcctcagcgccatccgcga

SEQ ID NO: 3288 - DNA, 201 bp, Homo sapiens
gggctgcgttgctggtcacattcctggcaggatgccaggccaaggtggagcaagcggtggagacagagccggagcccgagctgcgccagcagaccgagtgrcagagcggccagcgctgggaactggcactgggtcgcttttgggattacctgcgctgggtgcagacactgtctgagcaggtgcaggaggagctgctcagct

SEQ ID NO: 3289 - DNA, 201 bp, Homo sapiens
tgacctgcagaagcgcctggcagtgtaccaggccggggcccgcgagggcgccgagcgcggcctcagcgccatccgcgagcgcctggggcccctggtggaasagggccgcgtgcgggccgccactgtgggctccctggccggccagccgctacaggagcgggcccaggcctggggcgagcggctgcgcgcgcggatggagga

SEQ ID NO: 3290 - DNA, 201 bp, Homo sapiens
ccggctgggcgcggacatggaggacgtgcgcggccgcctggtgcagtaccgcggcgaggtgcaggccatgctcggccagagcaccgaggagctgcgggtghgcctcgcctcccacctgcgcaagctgcgtaagcggctcctccgcgatgccgatgacctgcagaagcgcctggcagtgtaccaggccggggcccgcgaggg

SEQ ID NO: 3291 - DNA, 201 bp, Homo sapiens
tgtgggctccctggccggccagccgctacaggagcgggcccaggcctggggcgagcggctgcgcgcgcggatggaggagatgggcagccggacccgcgacygcctggacgaggtgaaggagcaggtggcggaggtgcgcgccaagctggaggagcaggcccagcagatacgcctgcaggccgaggccttccaggcccgcct

SEQ ID NO: 3292 - DNA, 201 bp, Homo sapiens
gcggctcctccgcgatgccgatgacctgcagaagcgcctggcagtgtaccaggccggggcccgcgagggcgccgagcgcggcctcagcgccatccgcgagygcctggggcccctggtggaacagggccgcgtgcgggccgccactgtgggctccctggccggccagccgctacaggagcgggcccaggcctggggcgagcg

SEQ ID NO: 3293 - DNA, 201 bp, Homo sapiens
aagcaggctgatactacacagtatgtccccatgctagaaaggaaagaggtttctaaatattccgacatccagagatcactctatgatcgtccagcctcatrtaagaagaaatctatgttagactcagaagtcaaaaacctcctttcagatgataactcagaaggccttactttattggatttgttgagcttcacctatcaa

SEQ ID NO: 3294 - DNA, 201 bp, Homo sapiens
ccacggtgaaagacagtggagattacgaatgtgctgcccgccaggctaccagggaggtcaaagaaatgaagaaagtcactatttctgtccatgagaaaggkttcattgaaatcaaacccaccttcagccagttggaagctgtcaacctgcatgaagtcaaacattttgttgtagaggtgcgggcctacccacctcccagga

SEQ ID NO: 3295 - DNA, 201 bp, Homo sapiens
tattgagtggatgatatgcaaagatattaagaaatgtaataatgaaacttcctggactattttggccaacaatgtctcaaacatcatcacggagatccacycccgagacaggagtaccgtggagggccgtgtgactttcgccaaagtggaggagaccatcgccgtgcgatgcctggctaagaatctccttggagctgagaa

SEQ ID NO: 3296 - DNA, 201 bp, Homo sapiens
tctctgagatgctttggggagagtgaagtgagctggcagtaccccatgtctgaagaagagagctccgatgtggaaatcagaaatgaagaaaacaacagcgrcctttttgtgacggtcttggaagtgagcagtgcctcggcggcccacacagggttgtacacttgctattacaaccacactcagacagaagagaatgagctt

SEQ ID NO: 3297 - DNA, 201 bp, Homo sapiens
aaaatgaaaaggttgtgcagctgaattcatccttttctctgagatgctttggggagagtgaagtgagctggcagtaccccatgtctgaagaagagagctcygatgtggaaatcagaaatgaagaaaacaacagcggcctttttgtgacggtcttggaagtgagcagtgcctcggcggcccacacagggttgtacacttgct

SEQ ID NO: 3298 - DNA, 201 bp, Homo sapiens
gaaccctgctgatgaaagcacacggagctatgttattttatcttttgaaaacaatggtgactacatggacatgaagcaggctgatactacacagtatgtcyccatgctagaaaggaaagaggtttctaaatattccgacatccagagatcactctatgatcgtccagcctcatataagaagaaatctatgttagactcaga

SEQ ID NO: 3299 - DNA, 201 bp, Homo sapiens
ctttattggatttgttgagcttcacctatcaagttgcccgaggaatggagtttttggcttcaaaaaattgtgtccaccgtgatctggctgctcgcaacgtyctcctggcacaaggaaaaattgtgaagatctgtgactttggcctggccagagacatcatgcatgattcgaactatgtgtcgaaaggcagtacctttctgc

SEQ ID NO: 3300 - DNA, 201 bp, Homo sapiens
cctacgacagcagacagggctttaatgggaccttcactgtagggccctatatctgtgaggccaccgtcaaaggaaagaagttccagaccatcccatttaaygtttatgctttaaaagcaacatcagagctggatctagaaatggaagctcttaaaaccgtgtataagtcaggggaaacgattgtggtcacctgtgctgttt

SEQ ID NO: 3301 - DNA, 201 bp, Homo sapiens
taaaacaatccttactaagtaggtgatgagtttgacagtttttgacatttatattaaataacatgtttctctataaagtatggtaatagctttagtgaatyaaatttagttgagcatagagaacaaagtaaaagtagtgttgtccaggaagtcagaatttttaactgtactgaataggttccccaatccatcgtattaaaa

SEQ ID NO: 3302 - DNA, 201 bp, Homo sapiens
ggtgaactttgtgcttcaaggacattggtgagagtccaacagacacaatttatactgcgacagaacttcagcattgtaattatgtaaataactctaaccamggctgtgtttagattgtattaactatcttctttggacttctgaagagaccactcaatccatccatgtacttccctcttgaaacctgatgtcagctgctgt

SEQ ID NO: 3303 - DNA, 201 bp, Homo sapiens
tgttggtgattgtgatcatctcacttattgtcctggttgtcatttggaaacagaaaccgaggtatgaaattcgctggagggtcattgaatcaatcagcccrgatggacatgaatatatttatgtggacccgatgcagctgccttatgactcaagatgggagtttccaagagatggactagtgcttggtcgggtcttggggt

SEQ ID NO: 3304 - DNA, 201 bp, Homo sapiens
cctacccacctcccaggatatcctggctgaaaaacaatctgactctgattgaaaatctcactgagatcaccactgatgtggaaaagattcaggaaataagstatcgaagcaaattaaagctgatccgtgctaaggaagaagacagtggccattatactattgtagctcaaaatgaagatgctgtgaagagctatacttttg

SEQ ID NO: 3305 - DNA, 201 bp, Homo sapiens
attgtagctcaaaatgaagatgctgtgaagagctatacttttgaactgttaactcaagttccttcatccattctggacttggtcgatgatcaccatggctyaactgggggacagacggtgaggtgcacagctgaaggcacgccgcttcctgatattgagtggatgatatgcaaagatattaagaaatgtaataatgaaact

SEQ ID NO: 3306 - DNA, 201 bp, Homo sapiens
ctccctggctgttctgatcggccagttttcggaaacactgacttaggtttcaggaagttgccatgggaaacaaataatttgaactttggaacagggttggmattcaaccacgcaggaagcctactatttaaatccttggcttcaggttagtgacatttaatgccatctagctagcaattgcgaccttaatttaactttcca

SEQ ID NO: 3307 - DNA, 143 bp, Homo sapiens
cctacgacagcagacagggctttaatgggaccttcactgtagggccctatatctgtgaggccaccgtcaaaggaaagaagttccagaccatcccatttaaygtttatgctttaaaaggtacttgtatcatctccttccttctt

SEQ ID NO: 3308 - DNA, 201 bp, Homo sapiens; identical to SEQ ID NO: 3296

SEQ ID NO: 3309 - DNA, 201 bp, Homo sapiens; identical to SEQ ID NO: 3297

SEQ ID NO: 3310 - DNA, 124 bp, Homo sapiens
atgcgcgccgtggccctgcgcgckggctggcagcagcgcaggcgctcggagaagaaaatcaccaggctgccttgatgccaccgtcaaccacgtgtcccttatccttagctatgccaacagctgc

SEQ ID NO: 3311 - DNA, 123 bp, Homo sapiens
atgcgcgccgtggccctgcgcgmtggctggcagcagcgcaggcgctcggagaagaaaatcaccaggctgccttgatgccaccgtcaaccacgtgtcccttatccttagctatgccaacagctg

SEQ ID NO: 3312 - DNA, 201 bp, Homo sapiens
cttgatgccaccgtcaaccacgtgtcccttatccttagctatgccaacagctgcgccaaccccattctctatggcttcctctccgacaacttccgccgatycttccagcgggttctctgcctgcgctgctgcctcctggaaggtgctggaggtgctgaggaggagcccctggactactatgccactgctctcaagagcaaa

SEQ ID NO: 3313 - DNA, 201 bp, Homo sapiens
gcagcgcaggcgctcggagaagaaaatcaccaggctgccttgatgccaccgtcaaccacgtgtcccttatccttagctatgccaacagctgcgccaacccyattctctatggcttcctctccgacaacttccgccgattcttccagcgggttctctgcctgcgctgctgcctcctggaaggtgctggaggtgctgaggagg

SEQ ID NO: 3314 - DNA, 201 bp, Homo sapiens
cgccgtggccctgcgcgctggctggcagcagcgcaggcgctcggagaagaaaatcaccaggctgccttgatgccaccgtcaaccacgtgtcccttatcctyagctatgccaacagctgcgccaaccccattctctatggcttcctctccgacaacttccgccgattcttccagcgggttctctgcctgcgctgctgcctcc

SEQ ID NO: 3315 - DNA, 201 bp, Homo sapiens; identical to SEQ ID NO: 3312

SEQ ID NO: 3316 - DNA, 201 bp, Homo sapiens
tgccaggatgggcactgatgaatatggttgaacggaactccaaggaccacccaggttgatagtagtgagtttgtgtacagaagactgcaatgaattgaagycatgagacatacagccaggatcctgaaagccaccaacatatgtcacctgcctgggaggcttgcttcgatggtcatcttgttctgcctgctaagaccagga

SEQ ID NO: 3317 - DNA, 201 bp, Homo sapiens
atccagtgcatctacgcgctggtgtgcctggtggggctggtgggcaacgccctggtcatcttcgtgatccttcgctacgccaagatgaagacggctaccamcatctacctgctcaacctggccgtagccgacgagctcttcatgctgagcgtgcccttcgtggcctcgtcggccgccctgcgccactggcccttcggctcc

SEQ ID NO: 3318 - DNA, 201 bp, Homo sapiens
tggtctacactttcctgctgggcttcctgctgcccgtgctggccattggcctgtgctacctgctcatcgtgggcaagatgcgcgccgtggccctgcgcgckggctggcagcagcgcaggcgctcggagaagaaaatcaccaggctggtgctgatggtcgtggtcgtctttgtgctctgctggatgcctttctacgtggtgc

SEQ ID NO: 3319 - DNA, 201 bp, Homo sapiens
gtggtctacactttcctgctgggcttcctgctgcccgtgctggccattggcctgtgctacctgctcatcgtgggcaagatgcgcgccgtggccctgcgcgmtggctggcagcagcgcaggcgctcggagaagaaaatcaccaggctggtgctgatggtcgtggtcgtctttgtgctctgctggatgcctttctacgtggtg

SEQ ID NO: 3320 - DNA, 201 bp, Homo sapiens
tctacgtggtgcagctgctgaacctcttcgtgaccagccttgatgccaccgtcaaccacgtgtcccttatccttagctatgccaacagctgcgccaacccyattctctatggcttcctctccgacaacttccgccgattcttccagcgggttctctgcctgcgctgctgcctcctggaaggtgctggaggtgctgaggagg

SEQ ID NO: 3321 - DNA, 201 bp, Homo sapiens
tcgtctttgtgctctgctggatgcctttctacgtggtgcagctgctgaacctcttcgtgaccagccttgatgccaccgtcaaccacgtgtcccttatcctyagctatgccaacagctgcgccaaccccattctctatggcttcctctccgacaacttccgccgattcttccagcgggttctctgcctgcgctgctgcctcc

SEQ ID NO: 3322 - DNA, 201 bp, Homo sapiens
caggcgctcggagaagaaaatcaccaggctggtgctgatggtcgtggtcgtctttgtgctctgctggatgcctttctacgtggtgcagctgctgaacctcktcgtgaccagccttgatgccaccgtcaaccacgtgtcccttatccttagctatgccaacagctgcgccaaccccattctctatggcttcctctccgacaa

SEQ ID NO: 3323 - DNA, 201 bp, Homo sapiens; identical to SEQ ID NO: 3318

SEQ ID NO: 3324 - DNA, 201 bp, Homo sapiens; identical to SEQ ID NO: 3319

SEQ ID NO: 3325 - DNA, 201 bp, Homo sapiens; identical to SEQ ID NO: 3312

SEQ ID NO: 3326 - DNA, 201 bp, Homo sapiens; identical to SEQ ID NO: 3320

SEQ ID NO: 3327 - DNA, 201 bp, Homo sapiens; identical to SEQ ID NO: 3321

SEQ ID NO: 3328 - DNA, 201 bp, Homo sapiens; identical to SEQ ID NO: 3317

SEQ ID NO: 3329 - DNA, 201 bp, Homo sapiens; identical to SEQ ID NO: 3322

SEQ ID NO: 3330 - DNA, 201 bp, Homo sapiens
cctcttccctgggcctgtttctcgctgtccctgtcttttatccttctcatctgcctcttttttgctcaccctgtttctcactgccctcccctccgcctttytcacccctctgtccttttgagctcttttttgctctgtctcttcatttgccttttgcactctcaaactctttcatcttcccattcgctgtctgtatttctc

SEQ ID NO: 3331 - DNA, 201 bp, Homo sapiens
caccctgtttctcactgccctcccctccgcctttctcacccctctgtccttttgagctcttttttgctctgtctcttcatttgccttttgcactctcaaamtctttcatcttcccattcgctgtctgtatttctccataactatatctttcttcctctgtctccgcccacccacatttttctctttccctttctctctttg

SEQ ID NO: 3332 - DNA, 201 bp, Homo sapiens
acatgagcctcctggagaaccacacccgccaagcagacgaggactacagccacgacctcatgctgctccgcctgacagagcctgctgataccatcacagaygctgtgaaggtcgtggagttgcccaccgaggaacccgaagtggggagcacctgtttggcttccggctggggcagcatcgaaccagagaatttctcatttc

SEQ ID NO: 3333 - DNA, 201 bp, Homo sapiens
ctgtttggcttccggctggggcagcatcgaaccagagaatttctcatttccagatgatctccagtgtgtggacctcaaaatcctgcctaatgatgagtgcraaaaagcccacgtccagaaggtgacagacttcatgctgtgtgtcggacacctggaaggtggcaaagacacctgtgtgggtgattcagggggcccgctgat

SEQ ID NO: 3334 - DNA, 201 bp, Homo sapiens
agcatcgaaccagagaatttctcatttccagatgatctccagtgtgtggacctcaaaatcctgcctaatgatgagtgcaaaaaagcccacgtccagaaggwgacagacttcatgctgtgtgtcggacacctggaaggtggcaaagacacctgtgtgggtgattcagggggcccgctgatgtgtgatggtgtgctccaaggt

SEQ ID NO: 3335 - DNA, 201 bp, Homo sapiens
ccctcccccatgctcccctgccccatccccttttccccttcccgtcttctcatccctccattcccatctttccccagcaattaccagctctggctgggtcrccacaacttgtttgacgacgaaaacacagcccagtttgttcatgtcagtgagagcttcccacaccctggcttcaacatgagcctcctggagaaccacacc

SEQ ID NO: 3336 - DNA, 201 bp, Homo sapiens
ccaagcagacgaggactacagccacgacctcatgctgctccgcctgacagagcctgctgataccatcacagacgctgtgaaggtcgtggagttgcccaccsaggaacccgaagtggggagcacctgtttggcttccggctggggcagcatcgaaccagagaatttctcatttccagatgatctccagtgtgtggacctcaa

SEQ ID NO: 3337 - DNA, 201 bp, Homo sapiens
ttcttcctctgtctccgcccacccacatttttctctttccctttctctctttggggaccctcccccatgctcccctgccccatccccttttccccttcccrtcttctcatccctccattcccatctttccccagcaattaccagctctggctgggtcgccacaacttgtttgacgacgaaaacacagcccagtttgttcat

SEQ ID NO: 3338 - DNA, 201 bp, Homo sapiens; identical to SEQ ID NO: 3334

SEQ ID NO: 3339 - DNA, 201 bp, Homo sapiens; identical to SEQ ID NO: 3336

SEQ ID NO: 3340 - DNA, 201 bp, Homo sapiens
catttcagcactttccagtgtgggggcatcctggtgcaccgccagtgggtgctcacagctgctcattgcatcagcgacaattaccagctctggctgggtcrccacaacttgtttgacgacgaaaacacagcccagtttgttcatgtcagtgagagcttcccacaccctggcttcaacatgagcctcctggagaaccacacc

SEQ ID NO: 3341 - DNA, 201 bp, Homo sapiens; identical to SEQ ID NO: 3332

SEQ ID NO: 3342 - DNA, 201 bp, Homo sapiens; identical to SEQ ID NO: 3333

SEQ ID NO: 3343 - DNA, 201 bp, Homo sapiens
gttgacttgagtaaatatatcaccactattgctggagtcatgacactaagtcaagttaaaggctttgttcgaaagaatggtgtcaatgaagccaaaatagdtgagatcaagaatgacaatgtccaagacacagcagaacagaaagttcaactgcttcgtaattggcatcaacttcatggaaagaaagaagcgtatgacaca

SEQ ID NO: 3344 - DNA, 201 bp, Homo sapiens
gtcatgacactaagtcaagttaaaggctttgttcgaaagaatggtgtcaatgaagccaaaatagatgagatcaagaatgacaatgtccaagacacagcagracagaaagttcaactgcttcgtaattggcatcaacttcatggaaagaaagaagcgtatgacacattgattaaagatctcaaaaaagccaatctttgtact

SEQ ID NO: 3345 - DNA, 201 bp, Homo sapiens
agtggcaataaatttatctgatgttgacttgagtaaatatatcaccactattgctggagtcatgacactaagtcaagttaaaggctttgttcgaaagaatrgtgtcaatgaagccaaaatagatgagatcaagaatgacaatgtccaagacacagcagaacagaaagttcaactgcttcgtaattggcatcaacttcatgg

SEQ ID NO: 3346 - DNA, 201 bp, Homo sapiens
ctgttactacagttgagactcagaacttggaaggcctgcatcatgatggccaattctgccataagccctgtcctccaggtgaaaggaaagctagggactgmacagtcaatggggatgaaccagactgcgtgccctgccaagaagggaaggagtacacagacaaagcccatttttcttccaaatgcagaagatgtagattgt

SEQ ID NO: 3347 - DNA, 201 bp, Homo sapiens
gatgttgacttgagtaaatatatcaccactattgctggagtcatgacactaagtcaagttaaaggctttgttcgaaagaatggtgtcaatgaagccaaaakagatgagatcaagaatgacaatgtccaagacacagcagaacagaaagttcaactgcttcgtaattggcatcaacttcatggaaagaaagaagcgtatgac

SEQ ID NO: 3348 - DNA, 201 bp, Homo sapiens
aaatcctgtagtggcaataaatttatctgatgttgacttgagtaaatatatcaccactattgctggagtcatgacactaagtcaagttaaaggctttgttygaaagaatggtgtcaatgaagccaaaatagatgagatcaagaatgacaatgtccaagacacagcagaacagaaagttcaactgcttcgtaattggcatca

SEQ ID NO: 3349 - DNA, 201 bp, Homo sapiens
cttggaaggcctgcatcatgatggccaattctgccataagccctgtcctccaggtgaaaggaaagctagggactgcacagtcaatggggatgaaccagacygcgtgccctgccaagaagggaaggagtacacagacaaagcccatttttcttccaaatgcagaagatgtagattgtgtgatgaaggacatggcttagaagt

SEQ ID NO: 3350 - DNA, 201 bp, Homo sapiens
agtcatgacactaagtcaagttaaaggctttgttcgaaagaatggtgtcaatgaagccaaaatagatgagatcaagaatgacaatgtccaagacacagcaraacagaaagttcaactgcttcgtaattggcatcaacttcatggaaagaaagaagcgtatgacacattgattaaagatctcaaaaaagccaatctttgtac

SEQ ID NO: 3351 - DNA, 201 bp, Homo sapiens
catgacactaagtcaagttaaaggctttgttcgaaagaatggtgtcaatgaagccaaaatagatgagatcaagaatgacaatgtccaagacacagcagaayagaaagttcaactgcttcgtaattggcatcaacttcatggaaagaaagaagcgtatgacacattgattaaagatctcaaaaaagccaatctttgtactct

SEQ ID NO: 3352 - DNA, 201 bp, Homo sapiens
cttaaatcctgtagtggcaataaatttatctgatgttgacttgagtaaatatatcaccactattgctggagtcatgacactaagtcaagttaaaggctttsttcgaaagaatggtgtcaatgaagccaaaatagatgagatcaagaatgacaatgtccaagacacagcagaacagaaagttcaactgcttcgtaattggca

SEQ ID NO: 3353 - DNA, 201 bp, Homo sapiens
gtggcaataaatttatctgatgttgacttgagtaaatatatcaccactattgctggagtcatgacactaagtcaagttaaaggctttgttcgaaagaatgrtgtcaatgaagccaaaatagatgagatcaagaatgacaatgtccaagacacagcagaacagaaagttcaactgcttcgtaattggcatcaacttcatgga

SEQ ID NO: 3354 - DNA, 201 bp, Homo sapiens
gaacagaaagttcaactgcttcgtaattggcatcaacttcatggaaagaaagaagcgtatgacacattgattaaagatctcaaaaaagccaatctttgtaytcttgcagagaaaattcagactatcatcctcaaggacattactagtgactcagaaaattcaaacttcagaaatgaaatccaaagcttggtctagagtgaa

SEQ ID NO: 3355 - DNA, 201 bp, Homo sapiens
ttactacagttgagactcagaacttggaaggcctgcatcatgatggccaattctgccataagccctgtcctccaggtgaaaggaaagctagggactgcacrgtcaatggggatgaaccagactgcgtgccctgccaagaagggaaggagtacacagacaaagcccatttttcttccaaatgcagaagatgtagattgtgtg

SEQ ID NO: 3356 - DNA, 201 bp, Homo sapiens
ttaccatatttctaaactttgtttataactctgagaagatcatatttatgtaaagtatatgtatttgagtgcagaatttaaataaggctctacctcaaagwcctttgcacagtttattggtgtcatattatacaatatttcaattgtgaattcacatagaaaacattaaattataatgtttgactattatatatgtgtatg

SEQ ID NO: 3357 - DNA, 201 bp, Homo sapiens
tgttgacttgagtaaatatatcaccactattgctggagtcatgacactaagtcaagttaaaggctttgttcgaaagaatggtgtcaatgaagccaaaatabatgagatcaagaatgacaatgtccaagacacagcagaacagaaagttcaactgcttcgtaattggcatcaacttcatggaaagaaagaagcgtatgacac

SEQ ID NO: 3358 - DNA, 201 bp, Homo sapiens
ttttgccaattccactaattgtttgggtgaagagaaaggaagtacagaaaacatgcagaaagcacagaaaggaaaaccaaggttctcatgaatctccaacyttaaatcctgtagtggcaataaatttatctgatgttgacttgagtaaatatatcaccactattgctggagtcatgacactaagtcaagttaaaggctttg

SEQ ID NO: 3359 - DNA, 201 bp, Homo sapiens
ctgacatcaactccaagggattggaattgaggaagactgttactacagttgagactcagaacttggaaggcctgcatcatgatggccaattctgccataarccctgtcctccaggtgaaaggaaagctagggactgcacagtcaatggggatgaaccagactgcgtgccctgccaagaagggaaggagtacacagacaaag

SEQ ID NO: 3360 - DNA, 201 bp, Homo sapiens
ctgttgctagattatcgtccaaaagtgttaatgcccaagtgactgacatcaactccaagggattggaattgaggaagactgttactacagttgagactcaraacttggaaggcctgcatcatgatggccaattctgccataagccctgtcctccaggtgaaaggaaagctagggactgcacagtcaatggggatgaaccag

SEQ ID NO: 3361 - DNA, 201 bp, Homo sapiens
agacgcttctggggagtgagggaagcggtttacgagtgacttggctggagcctcaggggcgggcactggcacggaacacaccctgaggccagccctggctrcccaggcggagctgcctcttctcccgcgggttggtggacccgctcagtacggagttggggaagctctttcacttcggaggattgctcaacaaccatgctg

SEQ ID NO: 3362 - DNA, 201 bp, Homo sapiens
cttttgccaattccactaattgtttgggtgaagagaaaggaagtacagaaaacatgcagaaagcacagaaaggaaaaccaaggttctcatgaatctccaamcttaaatcctgtagtggcaataaatttatctgatgttgacttgagtaaatatatcaccactattgctggagtcatgacactaagtcaagttaaaggcttt

SEQ ID NO: 3363 - DNA, 201 bp, Homo sapiens
ggcactggcacggaacacaccctgaggccagccctggctgcccaggcggagctgcctcttctcccgcgggttggtggacccgctcagtacggagttggggragctctttcacttcggaggattgctcaacaaccatgctgggcatctggaccctcctacctctggttcttacgtctgttgctagattatcgtccaaaagtg

SEQ ID NO: 3364 - DNA, 201 bp, Homo sapiens
ccgctcagtacggagttggggaagctctttcacttcggaggattgctcaacaaccatgctgggcatctggaccctcctacctctggttcttacgtctgttrctagattatcgtccaaaagtgttaatgcccaagtgactgacatcaactccaagggattggaattgaggaagactgttactacagttgagactcagaactt

SEQ ID NO: 3365 - DNA, 201 bp, Homo sapiens
aaggagtacacagacaaagcccatttttcttccaaatgcagaagatgtagattgtgtgatgaaggacatggcttagaagtggaaataaactgcacccggayccagaataccaagtgcagatgtaaaccaaactttttttgtaactctactgtatgtgaacactgtgacccttgcaccaaatgtgaacatggaatcatcaag

SEQ ID NO: 3366 - DNA, 201 bp, Homo sapiens
ctgcttcgtaattggcatcaacttcatggaaagaaagaagcgtatgacacattgattaaagatctcaaaaaagccaatctttgtactcttgcagagaaaaktcagactatcatcctcaaggacattactagtgactcagaaaattcaaacttcagaaatgaaatccaaagcttggtctagagtgaaaaacaacaaattcag

SEQ ID NO: 3367 - DNA, 201 bp, Homo sapiens
ggaggattgctcaacaaccatgctgggcatctggaccctcctacctctggttcttacgtctgttgctagattatcgtccaaaagtgttaatgcccaagtgrctgacatcaactccaagggattggaattgaggaagactgttactacagttgagactcagaacttggaaggcctgcatcatgatggccaattctgccataa

SEQ ID NO: 3368 - DNA, 201 bp, Homo sapiens
ccaaggttctcatgaatctccaaccttaaatcctgtagtggcaataaatttatctgatgttgacttgagtaaatatatcaccactattgctggagtcatgmcactaagtcaagttaaaggctttgttcgaaagaatggtgtcaatgaagccaaaatagatgagatcaagaatgacaatgtccaagacacagcagaacagaa

SEQ ID NO: 3369 - DNA, 201 bp, Homo sapiens
caaggttctcatgaatctccaaccttaaatcctgtagtggcaataaatttatctgatgttgacttgagtaaatatatcaccactattgctggagtcatgamactaagtcaagttaaaggctttgttcgaaagaatggtgtcaatgaagccaaaatagatgagatcaagaatgacaatgtccaagacacagcagaacagaaa

SEQ ID NO: 3370 - DNA, 201 bp, Homo sapiens
aatcctgtagtggcaataaatttatctgatgttgacttgagtaaatatatcaccactattgctggagtcatgacactaagtcaagttaaaggctttgttcvaaagaatggtgtcaatgaagccaaaatagatgagatcaagaatgacaatgtccaagacacagcagaacagaaagttcaactgcttcgtaattggcatcaa

SEQ ID NO: 3371 - DNA, 201 bp, Homo sapiens
ttatctgatgttgacttgagtaaatatatcaccactattgctggagtcatgacactaagtcaagttaaaggctttgttcgaaagaatggtgtcaatgaagmcaaaatagatgagatcaagaatgacaatgtccaagacacagcagaacagaaagttcaactgcttcgtaattggcatcaacttcatggaaagaaagaagcg

SEQ ID NO: 3372 - DNA, 201 bp, Homo sapiens
gctggagtcatgacactaagtcaagttaaaggctttgttcgaaagaatggtgtcaatgaagccaaaatagatgagatcaagaatgacaatgtccaagacahagcagaacagaaagttcaactgcttcgtaattggcatcaacttcatggaaagaaagaagcgtatgacacattgattaaagatctcaaaaaagccaatctt

SEQ ID NO: 3373 - DNA, 201 bp, Homo sapiens
aagtcaagttaaaggctttgttcgaaagaatggtgtcaatgaagccaaaatagatgagatcaagaatgacaatgtccaagacacagcagaacagaaagttyaactgcttcgtaattggcatcaacttcatggaaagaaagaagcgtatgacacattgattaaagatctcaaaaaagccaatctttgtactcttgcagagaa

SEQ ID NO: 3374 - DNA, 201 bp, Homo sapiens; identical to SEQ ID NO: 3345

SEQ ID NO: 3375 - DNA, 201 bp, Homo sapiens; identical to SEQ ID NO: 3347

SEQ ID NO: 3376 - DNA, 201 bp, Homo sapiens; identical to SEQ ID NO: 3350

SEQ ID NO: 3377 - DNA, 201 bp, Homo sapiens; identical to SEQ ID NO: 3351

SEQ ID NO: 3378 - DNA, 201 bp, Homo sapiens; identical to SEQ ID NO: 3354

SEQ ID NO: 3379 - DNA, 201 bp, Homo sapiens; identical to SEQ ID NO: 3355

SEQ ID NO: 3380 - DNA, 201 bp, Homo sapiens; identical to SEQ ID NO: 3356

SEQ ID NO: 3381 - DNA, 201 bp, Homo sapiens; identical to SEQ ID NO: 3357

SEQ ID NO: 3382 - DNA, 201 bp, Homo sapiens
ttttgccaattccactaattgtttgggtgaagagaaaggaagtacagaaaacatgcagaaagcacagaaaggaaaaccaaggttctcatgaatctccaacyttaaatcctgaaacagtggcaataaatttatctgatgttgacttgagtaaatatatcaccactattgctggagtcatgacactaagtcaagttaaaggct

SEQ ID NO: 3383 - DNA, 201 bp, Homo sapiens
tgttcaataatgtcccatgtaaaacctgctacaaatggcagcttatacatagcaatggtaaaatcatcatctggatttaggaattgctcttgtcatacccycaagtttctaagatttaagattctccttactactatcctacgtttaaatatctttgaaagtttgtattaaatgtgaattttaagaaataatatttatatt

SEQ ID NO: 3384 - DNA, 201 bp, Homo sapiens; identical to SEQ ID NO: 3359

SEQ ID NO: 3385 - DNA, 201 bp, Homo sapiens; identical to SEQ ID NO: 3361

SEQ ID NO: 3386 - DNA, 201 bp, Homo sapiens; identical to SEQ ID NO: 3366

SEQ ID NO: 3387 - DNA, 201 bp, Homo sapiens
aggttctcatgaatctccaaccttaaatcctgaaacagtggcaataaatttatctgatgttgacttgagtaaatatatcaccactattgctggagtcatgmcactaagtcaagttaaaggctttgttcgaaagaatggtgtcaatgaagccaaaatagatgagatcaagaatgacaatgtccaagacacagcagaacagaa

SEQ ID NO: 3388 - DNA, 201 bp, Homo sapiens; identical to SEQ ID NO: 3346

SEQ ID NO: 3389 - DNA, 201 bp, Homo sapiens; identical to SEQ ID NO: 3344

SEQ ID NO: 3390 - DNA, 201 bp, Homo sapiens; identical to SEQ ID NO: 3343

SEQ ID NO: 3391 - DNA, 201 bp, Homo sapiens
tcctgaaacagtggcaataaatttatctgatgttgacttgagtaaatatatcaccactattgctggagtcatgacactaagtcaagttaaaggctttgttygaaagaatggtgtcaatgaagccaaaatagatgagatcaagaatgacaatgtccaagacacagcagaacagaaagttcaactgcttcgtaattggcatca

SEQ ID NO: 3392 - DNA, 201 bp, Homo sapiens; identical to SEQ ID NO: 3349

SEQ ID NO: 3393 - DNA, 201 bp, Homo sapiens
aaatcctgaaacagtggcaataaatttatctgatgttgacttgagtaaatatatcaccactattgctggagtcatgacactaagtcaagttaaaggctttsttcgaaagaatggtgtcaatgaagccaaaatagatgagatcaagaatgacaatgtccaagacacagcagaacagaaagttcaactgcttcgtaattggca

SEQ ID NO: 3394 - DNA, 201 bp, Homo sapiens; identical to SEQ ID NO: 3353

SEQ ID NO: 3395 - DNA, 201 bp, Homo sapiens; identical to SEQ ID NO: 3360

SEQ ID NO: 3396 - DNA, 201 bp, Homo sapiens; identical to SEQ ID NO: 3363

SEQ ID NO: 3397 - DNA, 201 bp, Homo sapiens
cttttgccaattccactaattgtttgggtgaagagaaaggaagtacagaaaacatgcagaaagcacagaaaggaaaaccaaggttctcatgaatctccaamcttaaatcctgaaacagtggcaataaatttatctgatgttgacttgagtaaatatatcaccactattgctggagtcatgacactaagtcaagttaaaggc

SEQ ID NO: 3398 - DNA, 201 bp, Homo sapiens; identical to SEQ ID NO: 3364

SEQ ID NO: 3399 - DNA, 201 bp, Homo sapiens; identical to SEQ ID NO: 3365

SEQ ID NO: 3400 - DNA, 201 bp, Homo sapiens; identical to SEQ ID NO: 3367

SEQ ID NO: 3401 - DNA, 201 bp, Homo sapiens
ggttctcatgaatctccaaccttaaatcctgaaacagtggcaataaatttatctgatgttgacttgagtaaatatatcaccactattgctggagtcatgamactaagtcaagttaaaggctttgttcgaaagaatggtgtcaatgaagccaaaatagatgagatcaagaatgacaatgtccaagacacagcagaacagaaa

SEQ ID NO: 3402 - DNA, 201 bp, Homo sapiens
cctgaaacagtggcaataaatttatctgatgttgacttgagtaaatatatcaccactattgctggagtcatgacactaagtcaagttaaaggctttgttcvaaagaatggtgtcaatgaagccaaaatagatgagatcaagaatgacaatgtccaagacacagcagaacagaaagttcaactgcttcgtaattggcatcaa

SEQ ID NO: 3403 - DNA, 201 bp, Homo sapiens; identical to SEQ ID NO: 3371

SEQ ID NO: 3404 - DNA, 201 bp, Homo sapiens; identical to SEQ ID NO: 3372

SEQ ID NO: 3405 - DNA, 201 bp, Homo sapiens; identical to SEQ ID NO: 3373

SEQ ID NO: 3406 - DNA, 201 bp, Homo sapiens; identical to SEQ ID NO: 3346

SEQ ID NO: 3407 - DNA, 201 bp, Homo sapiens; identical to SEQ ID NO: 3343

SEQ ID NO: 3408 - DNA, 201 bp, Homo sapiens; identical to SEQ ID NO: 3344

SEQ ID NO: 3409 - DNA, 201 bp, Homo sapiens; identical to SEQ ID NO: 3345

SEQ ID NO: 3410 - DNA, 201 bp, Homo sapiens; identical to SEQ ID NO: 3391

SEQ ID NO: 3411 - DNA, 201 bp, Homo sapiens; identical to SEQ ID NO: 3347

SEQ ID NO: 3412 - DNA, 201 bp, Homo sapiens
cttggaaggcctgcatcatgatggccaattctgccataagccctgtcctccaggtgaaaggaaagctagggactgcacagtcaatggggatgaaccagacygcgtgccctgccaagaagggaaggagtacacagacaaagcccatttttcttccaaatgcagaagatgtagattgtgtgatgaaggacatgatgtgaacat

SEQ ID NO: 3413 - DNA, 201 bp, Homo sapiens; identical to SEQ ID NO: 3350

SEQ ID NO: 3414 - DNA, 201 bp, Homo sapiens; identical to SEQ ID NO: 3351

SEQ ID NO: 3415 - DNA, 201 bp, Homo sapiens; identical to SEQ ID NO: 3393

SEQ ID NO: 3416 - DNA, 201 bp, Homo sapiens; identical to SEQ ID NO: 3353

SEQ ID NO: 3417 - DNA, 201 bp, Homo sapiens; identical to SEQ ID NO: 3355

SEQ ID NO: 3418 - DNA, 201 bp, Homo sapiens; identical to SEQ ID NO: 3356

SEQ ID NO: 3419 - DNA, 201 bp, Homo sapiens; identical to SEQ ID NO: 3354

SEQ ID NO: 3420 - DNA, 201 bp, Homo sapiens; identical to SEQ ID NO: 3382

SEQ ID NO: 3421 - DNA, 201 bp, Homo sapiens; identical to SEQ ID NO: 3357

SEQ ID NO: 3422 - DNA, 201 bp, Homo sapiens; identical to SEQ ID NO: 3359

SEQ ID NO: 3423 - DNA, 201 bp, Homo sapiens; identical to SEQ ID NO: 3360

SEQ ID NO: 3424 - DNA, 201 bp, Homo sapiens; identical to SEQ ID NO: 3361

SEQ ID NO: 3425 - DNA, 201 bp, Homo sapiens; identical to SEQ ID NO: 3397

SEQ ID NO: 3426 - DNA, 201 bp, Homo sapiens; identical to SEQ ID NO: 3363

SEQ ID NO: 3427 - DNA, 201 bp, Homo sapiens; identical to SEQ ID NO: 3364

SEQ ID NO: 3428 - DNA, 201 bp, Homo sapiens; identical to SEQ ID NO: 3366

SEQ ID NO: 3429 - DNA, 201 bp, Homo sapiens; identical to SEQ ID NO: 3387

SEQ ID NO: 3430 - DNA, 201 bp, Homo sapiens; identical to SEQ ID NO: 3367

SEQ ID NO: 3431 - DNA, 201 bp, Homo sapiens; identical to SEQ ID NO: 3401

SEQ ID NO: 3432 - DNA, 201 bp, Homo sapiens; identical to SEQ ID NO: 3402

SEQ ID NO: 3433 - DNA, 201 bp, Homo sapiens; identical to SEQ ID NO: 3371

SEQ ID NO: 3434 - DNA, 201 bp, Homo sapiens; identical to SEQ ID NO: 3372

SEQ ID NO: 3435 - DNA, 201 bp, Homo sapiens; identical to SEQ ID NO: 3373

SEQ ID NO: 3436 - DNA, 201 bp, Homo sapiens
gactattttctatttttcagatgttgacttgagtaaatatatcaccactattgctggagtcatgacactaagtcaagttaaaggctttgttcgaaagaatrgtgtcaatgaagccaaaatagatgagatcaagaatgacaatgtccaagacacagcagaacagaaagttcaactgcttcgtaattggcatcaacttcatgg

SEQ ID NO: 3437 - DNA, 201 bp, Homo sapiens; identical to SEQ ID NO: 3347

SEQ ID NO: 3438 - DNA, 201 bp, Homo sapiens; identical to SEQ ID NO: 3350

SEQ ID NO: 3439 - DNA, 201 bp, Homo sapiens; identical to SEQ ID NO: 3351

SEQ ID NO: 3440 - DNA, 201 bp, Homo sapiens
ctaatttcagtgacatattatgggatcttgttatttctcatacaattctacctgctcagcataaagcatttatcaggcagtttgtttaaatttataatgartactcatagttaaaaataatcaagtaacaataagacacaatagtctgaggcttaagaaacttttccttcataatcagctagatgtattacagaactcctg

SEQ ID NO: 3441 - DNA, 201 bp, Homo sapiens
agaactcctgcctaaaaagatctagaggttaaagtgtactgtagactcaggtattatcagtgtacccaactctataacaacatacatgattccattcagtkgttctttgatctgtgatttagagataagatgatcataaactctttgcttatacttttagatttgtgggtcattgatcattggatccataagagatgttat

SEQ ID NO: 3442 - DNA, 201 bp, Homo sapiens; identical to SEQ ID NO: 3354

SEQ ID NO: 3443 - DNA, 201 bp, Homo sapiens
tcaactgtgaccctgggactacaggcatgcaccaccatgccaggttaattttttatttttattttttatagagacagggttcactttgttgcccaggctgrtctcaaacttttgacctcaagcaatccttctgcctcagcctcccaaagttctgggattataggtgtgagccatcacatccggcctgttactttctttatt

SEQ ID NO: 3444 - DNA, 201 bp, Homo sapiens; identical to SEQ ID NO: 3356

SEQ ID NO: 3445 - DNA, 201 bp, Homo sapiens; identical to SEQ ID NO: 3355

SEQ ID NO: 3446 - DNA, 201 bp, Homo sapiens; identical to SEQ ID NO: 3383

SEQ ID NO: 3447 - DNA, 201 bp, Homo sapiens
gttgataaaatttctttgttctttcagtgaagagaaaggaagtacagaaaacatgcagaaagcacagaaaggaaaaccaaggttctcatgaatctccaacyttaaatcctgtaggtattgaaataggtatcagctttccttgaaaagaaaaatagagaaattagtgatttggctttttgttacttccttttacttttttgt

SEQ ID NO: 3448 - DNA, 201 bp, Homo sapiens; identical to SEQ ID NO: 3357

SEQ ID NO: 3449 - DNA, 201 bp, Homo sapiens; identical to SEQ ID NO: 3359

SEQ ID NO: 3450 - DNA, 201 bp, Homo sapiens; identical to SEQ ID NO: 3361

SEQ ID NO: 3451 - DNA, 201 bp, Homo sapiens; identical to SEQ ID NO: 3366

SEQ ID NO: 3452 - DNA, 201 bp, Homo sapiens
actaatgggaatttcatttagaaaaacaaattttcagactattttctatttttcagatgttgacttgagtaaatatatcaccactattgctggagtcatgmcactaagtcaagttaaaggctttgttcgaaagaatggtgtcaatgaagccaaaatagatgagatcaagaatgacaatgtccaagacacagcagaacagaa

SEQ ID NO: 3453 - DNA, 201 bp, Homo sapiens
accaagtgcaaagaggaaggtaattatttttttacggttatattctcctttcccccaaccccatggaaagatgtgaagaaaaaccaatcactcttgattastagaaagtcctttatttaatcttaaagattgcttattttcatataaaatgtccaatgttccaacctacaggatccagatctaacttggggtggctttgtc

SEQ ID NO: 3454 - DNA, 201 bp, Homo sapiens; identical to SEQ ID NO: 3346

SEQ ID NO: 3455 - DNA, 201 bp, Homo sapiens; identical to SEQ ID NO: 3343

SEQ ID NO: 3456 - DNA, 201 bp, Homo sapiens; identical to SEQ ID NO: 3344

SEQ ID NO: 3457 - DNA, 201 bp, Homo sapiens
aaattttcagactattttctatttttcagatgttgacttgagtaaatatatcaccactattgctggagtcatgacactaagtcaagttaaaggctttgttygaaagaatggtgtcaatgaagccaaaatagatgagatcaagaatgacaatgtccaagacacagcagaacagaaagttcaactgcttcgtaattggcatca

SEQ ID NO: 3458 - DNA, 201 bp, Homo sapiens; identical to SEQ ID NO: 3349

SEQ ID NO: 3459 - DNA, 201 bp, Homo sapiens
ttgcctcattcttacctataaaaagctaccactttggtagatttatgtattgttaatttcttgcccctgaatgcagccttgagagctgactgataagaacraatgaaattattcctcagctagtttctgagcaacagttttggggcattgagtggtattctcatccttcctatgaacaggtgttctctgcagcagcagaat

SEQ ID NO: 3460 - DNA, 201 bp, Homo sapiens
ggaaacagtggcaataaatttatctggtaaggcttttatcattttatttcatagagatggcatcctttagagtaataggccaatttcagagtaaaataatrttactaatttcagtgacatattatgggatcttgttatttctcatacaattctacctgctcagcataaagcatttatcaggcagtttgtttaaatttataa

SEQ ID NO: 3461 - DNA, 201 bp, Homo sapiens
attactgggtatatggcaggatttggagttagaactcaaggttgtcttgtttctgtattcccctagtcagctcttcatagacctttaggacttagctataytctgaagtactataaaaagagaaataaacatggttttcactaatgggaatttcatttagaaaaacaaattttcagactattttctatttttcagatgttg

SEQ ID NO: 3462 - DNA, 201 bp, Homo sapiens
aacaaattttcagactattttctatttttcagatgttgacttgagtaaatatatcaccactattgctggagtcatgacactaagtcaagttaaaggctttsttcgaaagaatggtgtcaatgaagccaaaatagatgagatcaagaatgacaatgtccaagacacagcagaacagaaagttcaactgcttcgtaattggca

SEQ ID NO: 3463 - DNA, 201 bp, Homo sapiens
actattttctatttttcagatgttgacttgagtaaatatatcaccactattgctggagtcatgacactaagtcaagttaaaggctttgttcgaaagaatgrtgtcaatgaagccaaaatagatgagatcaagaatgacaatgtccaagacacagcagaacagaaagttcaactgcttcgtaattggcatcaacttcatgga

SEQ ID NO: 3464 - DNA, 201 bp, Homo sapiens
gctagtttctgagcaacagttttggggcattgagtggtattctcatccttcctatgaacaggtgttctctgcagcagcagaattggccaaaaatcagaagyaattcttcactattcattgagatctccctatgcaaaaagagaacacaagaagcaaaggcattcccaggaaacacattgcagggaacactttaaaaacttg

SEQ ID NO: 3465 - DNA, 201 bp, Homo sapiens
caatccttctgcctcagcctcccaaagttctgggattataggtgtgagccatcacatccggcctgttactttctttatttaaacattgcttgtgtttgtgkgtgcataggttaaaggggcctcacagatgaattatgatatggtacccaaattaaaagtaaacttgtacacaaaaaccgtaagaatcaacaaaggagggaa

SEQ ID NO: 3466 - DNA, 201 bp, Homo sapiens; identical to SEQ ID NO: 3360

SEQ ID NO: 3467 - DNA, 201 bp, Homo sapiens
gtgggagttaggattctttaaattaatatggtaaaaaaaatttcaatttgagccattttctggtattaagaataagaatagttacagggaagaaaattttrgagtagttatatttattatttattttaataagtctatatgaaaaataacctcaacctattttatgaattctttaggtttcttgcctttaaaaactaagac

SEQ ID NO: 3468 - DNA, 201 bp, Homo sapiens
cattttctggtattaagaataagaatagttacagggaagaaaattttagagtagttatatttattatttattttaataagtctatatgaaaaataacctcmacctattttatgaattctttaggtttcttgcctttaaaaactaagacaatattgcttagtttctggcaaggccggaacctttcagaataaaaattgaatg

SEQ ID NO: 3469 - DNA, 201 bp, Homo sapiens
agttgataaaatttctttgttctttcagtgaagagaaaggaagtacagaaaacatgcagaaagcacagaaaggaaaaccaaggttctcatgaatctccaamcttaaatcctgtaggtattgaaataggtatcagctttccttgaaaagaaaaatagagaaattagtgatttggctttttgttacttccttttacttttttg

SEQ ID NO: 3470 - DNA, 201 bp, Homo sapiens; identical to SEQ ID NO: 3363

SEQ ID NO: 3471 - DNA, 201 bp, Homo sapiens; identical to SEQ ID NO: 3364

SEQ ID NO: 3472 - DNA, 201 bp, Homo sapiens; identical to SEQ ID NO: 3365

SEQ ID NO: 3473 - DNA, 201 bp, Homo sapiens; identical to SEQ ID NO: 3367

SEQ ID NO: 3474 - DNA, 201 bp, Homo sapiens
ctaatgggaatttcatttagaaaaacaaattttcagactattttctatttttcagatgttgacttgagtaaatatatcaccactattgctggagtcatgamactaagtcaagttaaaggctttgttcgaaagaatggtgtcaatgaagccaaaatagatgagatcaagaatgacaatgtccaagacacagcagaacagaaa

SEQ ID NO: 3475 - DNA, 201 bp, Homo sapiens
aattttcagactattttctatttttcagatgttgacttgagtaaatatatcaccactattgctggagtcatgacactaagtcaagttaaaggctttgttcvaaagaatggtgtcaatgaagccaaaatagatgagatcaagaatgacaatgtccaagacacagcagaacagaaagttcaactgcttcgtaattggcatcaa

SEQ ID NO: 3476 - DNA, 201 bp, Homo sapiens
ttttcagatgttgacttgagtaaatatatcaccactattgctggagtcatgacactaagtcaagttaaaggctttgttcgaaagaatggtgtcaatgaagmcaaaatagatgagatcaagaatgacaatgtccaagacacagcagaacagaaagttcaactgcttcgtaattggcatcaacttcatggaaagaaagaagcg

SEQ ID NO: 3477 - DNA, 201 bp, Homo sapiens; identical to SEQ ID NO: 3372

SEQ ID NO: 3478 - DNA, 201 bp, Homo sapiens; identical to SEQ ID NO: 3373

SEQ ID NO: 3479 - DNA, 201 bp, Homo sapiens; identical to SEQ ID NO: 3343

SEQ ID NO: 3480 - DNA, 201 bp, Homo sapiens; identical to SEQ ID NO: 3344

SEQ ID NO: 3481 - DNA, 201 bp, Homo sapiens; identical to SEQ ID NO: 3345

SEQ ID NO: 3482 - DNA, 201 bp, Homo sapiens; identical to SEQ ID NO: 3391

SEQ ID NO: 3483 - DNA, 201 bp, Homo sapiens; identical to SEQ ID NO: 3347

SEQ ID NO: 3484 - DNA, 201 bp, Homo sapiens; identical to SEQ ID NO: 3350

SEQ ID NO: 3485 - DNA, 201 bp, Homo sapiens; identical to SEQ ID NO: 3351

SEQ ID NO: 3486 - DNA, 201 bp, Homo sapiens; identical to SEQ ID NO: 3393

SEQ ID NO: 3487 - DNA, 201 bp, Homo sapiens; identical to SEQ ID NO: 3353

SEQ ID NO: 3488 - DNA, 201 bp, Homo sapiens; identical to SEQ ID NO: 3356

SEQ ID NO: 3489 - DNA, 201 bp, Homo sapiens; identical to SEQ ID NO: 3354

SEQ ID NO: 3490 - DNA, 201 bp, Homo sapiens; identical to SEQ ID NO: 3383

SEQ ID NO: 3491 - DNA, 201 bp, Homo sapiens; identical to SEQ ID NO: 3382

SEQ ID NO: 3492 - DNA, 201 bp, Homo sapiens; identical to SEQ ID NO: 3357

SEQ ID NO: 3493 - DNA, 201 bp, Homo sapiens
ctgacatcaactccaagggattggaattgaggaagactgttactacagttgagactcagaacttggaaggcctgcatcatgatggccaattctgccataarccctgtcctccagatgtgaacatggaatcatcaaggaatgcacactcaccagcaacaccaagtgcaaagaggaaggatccagatctaacttggggtggct

SEQ ID NO: 3494 - DNA, 201 bp, Homo sapiens
ctgttgctagattatcgtccaaaagtgttaatgcccaagtgactgacatcaactccaagggattggaattgaggaagactgttactacagttgagactcaraacttggaaggcctgcatcatgatggccaattctgccataagccctgtcctccagatgtgaacatggaatcatcaaggaatgcacactcaccagcaacac

SEQ ID NO: 3495 - DNA, 201 bp, Homo sapiens; identical to SEQ ID NO: 3361

SEQ ID NO: 3496 - DNA, 201 bp, Homo sapiens; identical to SEQ ID NO: 3363

SEQ ID NO: 3497 - DNA, 201 bp, Homo sapiens; identical to SEQ ID NO: 3397

SEQ ID NO: 3498 - DNA, 201 bp, Homo sapiens; identical to SEQ ID NO: 3364

SEQ ID NO: 3499 - DNA, 201 bp, Homo sapiens; identical to SEQ ID NO: 3366

SEQ ID NO: 3500 - DNA, 201 bp, Homo sapiens; identical to SEQ ID NO: 3387

SEQ ID NO: 3501 - DNA, 201 bp, Homo sapiens; identical to SEQ ID NO: 3367

SEQ ID NO: 3502 - DNA, 201 bp, Homo sapiens; identical to SEQ ID NO: 3401

SEQ ID NO: 3503 - DNA, 201 bp, Homo sapiens; identical to SEQ ID NO: 3402

SEQ ID NO: 3504 - DNA, 201 bp, Homo sapiens; identical to SEQ ID NO: 3371

SEQ ID NO: 3505 - DNA, 201 bp, Homo sapiens; identical to SEQ ID NO: 3372

SEQ ID NO: 3506 - DNA, 201 bp, Homo sapiens; identical to SEQ ID NO: 3373

SEQ ID NO: 3507 - DNA, 201 bp, Homo sapiens; identical to SEQ ID NO: 3343

SEQ ID NO: 3508 - DNA, 201 bp, Homo sapiens; identical to SEQ ID NO: 3344

SEQ ID NO: 3509 - DNA, 201 bp, Homo sapiens; identical to SEQ ID NO: 3345

SEQ ID NO: 3510 - DNA, 201 bp, Homo sapiens; identical to SEQ ID NO: 3346

SEQ ID NO: 3511 - DNA, 201 bp, Homo sapiens; identical to SEQ ID NO: 3347

SEQ ID NO: 3512 - DNA, 201 bp, Homo sapiens; identical to SEQ ID NO: 3348

SEQ ID NO: 3513 - DNA, 201 bp, Homo sapiens; identical to SEQ ID NO: 3349

SEQ ID NO: 3514 - DNA, 201 bp, Homo sapiens; identical to SEQ ID NO: 3350

SEQ ID NO: 3515 - DNA, 201 bp, Homo sapiens; identical to SEQ ID NO: 3351

SEQ ID NO: 3516 - DNA, 201 bp, Homo sapiens; identical to SEQ ID NO: 3352

SEQ ID NO: 3517 - DNA, 201 bp, Homo sapiens; identical to SEQ ID NO: 3353

SEQ ID NO: 3518 - DNA, 201 bp, Homo sapiens; identical to SEQ ID NO: 3354

SEQ ID NO: 3519 - DNA, 201 bp, Homo sapiens; identical to SEQ ID NO: 3355

SEQ ID NO: 3520 - DNA, 201 bp, Homo sapiens; identical to SEQ ID NO: 3356

SEQ ID NO: 3521 - DNA, 201 bp, Homo sapiens; identical to SEQ ID NO: 3357

SEQ ID NO: 3522 - DNA, 201 bp, Homo sapiens
ccagcaacaccaagtgcaaagaggaagtgaagagaaaggaagtacagaaaacatgcagaaagcacagaaaggaaaaccaaggttctcatgaatctccaacyttaaatcctgtagtggcaataaatttatctgatgttgacttgagtaaatatatcaccactattgctggagtcatgacactaagtcaagttaaaggctttg

SEQ ID NO: 3523 - DNA, 201 bp, Homo sapiens; identical to SEQ ID NO: 3359

SEQ ID NO: 3524 - DNA, 201 bp, Homo sapiens; identical to SEQ ID NO: 3360

SEQ ID NO: 3525 - DNA, 201 bp, Homo sapiens; identical to SEQ ID NO: 3361

SEQ ID NO: 3526 - DNA, 201 bp, Homo sapiens
accagcaacaccaagtgcaaagaggaagtgaagagaaaggaagtacagaaaacatgcagaaagcacagaaaggaaaaccaaggttctcatgaatctccaamcttaaatcctgtagtggcaataaatttatctgatgttgacttgagtaaatatatcaccactattgctggagtcatgacactaagtcaagttaaaggcttt

SEQ ID NO: 3527 - DNA, 201 bp, Homo sapiens; identical to SEQ ID NO: 3363

SEQ ID NO: 3528 - DNA, 201 bp, Homo sapiens; identical to SEQ ID NO: 3364

SEQ ID NO: 3529 - DNA, 201 bp, Homo sapiens; identical to SEQ ID NO: 3365

SEQ ID NO: 3530 - DNA, 201 bp, Homo sapiens; identical to SEQ ID NO: 3366

SEQ ID NO: 3531 - DNA, 201 bp, Homo sapiens; identical to SEQ ID NO: 3367

SEQ ID NO: 3532 - DNA, 201 bp, Homo sapiens; identical to SEQ ID NO: 3368

SEQ ID NO: 3533 - DNA, 201 bp, Homo sapiens; identical to SEQ ID NO: 3369

SEQ ID NO: 3534 - DNA, 201 bp, Homo sapiens; identical to SEQ ID NO: 3370

SEQ ID NO: 3535 - DNA, 201 bp, Homo sapiens; identical to SEQ ID NO: 3371

SEQ ID NO: 3536 - DNA, 201 bp, Homo sapiens; identical to SEQ ID NO: 3372

SEQ ID NO: 3537 - DNA, 201 bp, Homo sapiens; identical to SEQ ID NO: 3373

SEQ ID NO: 3538 - DNA, 201 bp, Homo sapiens; identical to SEQ ID NO: 3346

SEQ ID NO: 3539 - DNA, 201 bp, Homo sapiens; identical to SEQ ID NO: 3343

SEQ ID NO: 3540 - DNA, 201 bp, Homo sapiens; identical to SEQ ID NO: 3344

SEQ ID NO: 3541 - DNA, 201 bp, Homo sapiens; identical to SEQ ID NO: 3345

SEQ ID NO: 3542 - DNA, 201 bp, Homo sapiens; identical to SEQ ID NO: 3391

SEQ ID NO: 3543 - DNA, 201 bp, Homo sapiens; identical to SEQ ID NO: 3347

SEQ ID NO: 3544 - DNA, 201 bp, Homo sapiens; identical to SEQ ID NO: 3412

SEQ ID NO: 3545 - DNA, 201 bp, Homo sapiens; identical to SEQ ID NO: 3350

SEQ ID NO: 3546 - DNA, 201 bp, Homo sapiens; identical to SEQ ID NO: 3351

SEQ ID NO: 3547 - DNA, 201 bp, Homo sapiens; identical to SEQ ID NO: 3393

SEQ ID NO: 3548 - DNA, 201 bp, Homo sapiens; identical to SEQ ID NO: 3353

SEQ ID NO: 3549 - DNA, 201 bp, Homo sapiens; identical to SEQ ID NO: 3355

SEQ ID NO: 3550 - DNA, 201 bp, Homo sapiens; identical to SEQ ID NO: 3356

SEQ ID NO: 3551 - DNA, 201 bp, Homo sapiens; identical to SEQ ID NO: 3354

SEQ ID NO: 3552 - DNA, 201 bp, Homo sapiens; identical to SEQ ID NO: 3383

SEQ ID NO: 3553 - DNA, 201 bp, Homo sapiens; identical to SEQ ID NO: 3382

SEQ ID NO: 3554 - DNA, 201 bp, Homo sapiens; identical to SEQ ID NO: 3357

SEQ ID NO: 3555 - DNA, 201 bp, Homo sapiens; identical to SEQ ID NO: 3359

SEQ ID NO: 3556 - DNA, 201 bp, Homo sapiens; identical to SEQ ID NO: 3360

SEQ ID NO: 3557 - DNA, 201 bp, Homo sapiens; identical to SEQ ID NO: 3361

SEQ ID NO: 3558 - DNA, 201 bp, Homo sapiens; identical to SEQ ID NO: 3397

SEQ ID NO: 3559 - DNA, 201 bp, Homo sapiens; identical to SEQ ID NO: 3363

SEQ ID NO: 3560 - DNA, 201 bp, Homo sapiens; identical to SEQ ID NO: 3364

SEQ ID NO: 3561 - DNA, 201 bp, Homo sapiens; identical to SEQ ID NO: 3366

SEQ ID NO: 3562 - DNA, 201 bp, Homo sapiens; identical to SEQ ID NO: 3387

SEQ ID NO: 3563 - DNA, 201 bp, Homo sapiens; identical to SEQ ID NO: 3367

SEQ ID NO: 3564 - DNA, 201 bp, Homo sapiens; identical to SEQ ID NO: 3401

SEQ ID NO: 3565 - DNA, 201 bp, Homo sapiens; identical to SEQ ID NO: 3402

SEQ ID NO: 3566 - DNA, 201 bp, Homo sapiens; identical to SEQ ID NO: 3371

SEQ ID NO: 3567 - DNA, 201 bp, Homo sapiens; identical to SEQ ID NO: 3372

SEQ ID NO: 3568 - DNA, 201 bp, Homo sapiens; identical to SEQ ID NO: 3373

SEQ ID NO: 3569 - DNA, 201 bp, Homo sapiens; identical to SEQ ID NO: 3343

SEQ ID NO: 3570 - DNA, 201 bp, Homo sapiens; identical to SEQ ID NO: 3344

SEQ ID NO: 3571 - DNA, 201 bp, Homo sapiens; identical to SEQ ID NO: 3345

SEQ ID NO: 3572 - DNA, 201 bp, Homo sapiens; identical to SEQ ID NO: 3391

SEQ ID NO: 3573 - DNA, 201 bp, Homo sapiens; identical to SEQ ID NO: 3347

SEQ ID NO: 3574 - DNA, 201 bp, Homo sapiens; identical to SEQ ID NO: 3350

SEQ ID NO: 3575 - DNA, 201 bp, Homo sapiens; identical to SEQ ID NO: 3351

SEQ ID NO: 3576 - DNA, 201 bp, Homo sapiens; identical to SEQ ID NO: 3393

SEQ ID NO: 3577 - DNA, 201 bp, Homo sapiens; identical to SEQ ID NO: 3353

SEQ ID NO: 3578 - DNA, 201 bp, Homo sapiens; identical to SEQ ID NO: 3356

SEQ ID NO: 3579 - DNA, 201 bp, Homo sapiens; identical to SEQ ID NO: 3354

SEQ ID NO: 3580 - DNA, 201 bp, Homo sapiens; identical to SEQ ID NO: 3382

SEQ ID NO: 3581 - DNA, 201 bp, Homo sapiens; identical to SEQ ID NO: 3357

SEQ ID NO: 3582 - DNA, 201 bp, Homo sapiens; identical to SEQ ID NO: 3493

SEQ ID NO: 3583 - DNA, 201 bp, Homo sapiens; identical to SEQ ID NO: 3494

SEQ ID NO: 3584 - DNA, 201 bp, Homo sapiens; identical to SEQ ID NO: 3361

SEQ ID NO: 3585 - DNA, 201 bp, Homo sapiens; identical to SEQ ID NO: 3363

SEQ ID NO: 3586 - DNA, 201 bp, Homo sapiens; identical to SEQ ID NO: 3397

SEQ ID NO: 3587 - DNA, 201 bp, Homo sapiens; identical to SEQ ID NO: 3364

SEQ ID NO: 3588 - DNA, 201 bp, Homo sapiens; identical to SEQ ID NO: 3366

SEQ ID NO: 3589 - DNA, 201 bp, Homo sapiens; identical to SEQ ID NO: 3387

SEQ ID NO: 3590 - DNA, 201 bp, Homo sapiens; identical to SEQ ID NO: 3367

SEQ ID NO: 3591 - DNA, 201 bp, Homo sapiens; identical to SEQ ID NO: 3401

SEQ ID NO: 3592 - DNA, 201 bp, Homo sapiens; identical to SEQ ID NO: 3402

SEQ ID NO: 3593 - DNA, 201 bp, Homo sapiens; identical to SEQ ID NO: 3371

SEQ ID NO: 3594 - DNA, 201 bp, Homo sapiens; identical to SEQ ID NO: 3372

SEQ ID NO: 3595 - DNA, 201 bp, Homo sapiens; identical to SEQ ID NO: 3373

SEQ ID NO: 3596 - DNA, 201 bp, Homo sapiens
agtatgtcgaatcagagaacgggcagatgtatatccagaaaaagcctaccatgtacccaccctgggacagcacttttgatgcccatatcaacaagggaagrgtcatgcagatcattgtgaaaggcaaaaacgtggacctcatctctgaaaccaccgtggagctctactcgctggctgagaggtgcaggaagaacaacggga

SEQ ID NO: 3597 - DNA, 133 bp, Homo sapiens
catgctgtttgcagcagtcaattgagttgaattagaattccaaccatacattttaaaggtatttgtgctgtgtgtatattttgataaaatgttgtgacttmatggcaaacaggtggatgtgtaaaaatggaat

SEQ ID NO: 3598 - DNA, 201 bp, Homo sapiens
cttcatgaaccccgggatggagcggctgatatcctgaatcttgcccctccagagacaggaaagaatttgccttctccctgggaactggttcaagagacacwgcttgggttcctttttcaacttggaaaaagaaagaaacactcaacaataaagactgagacccgttcgcccccatgtgacttttatctgtagcagaaacca

SEQ ID NO: 3599 - DNA, 201 bp, Homo sapiens
ctccctgggaactggttcaagagacactgcttgggttcctttttcaacttggaaaaagaaagaaacactcaacaataaagactgagacccgttcgcccccrtgtgacttttatctgtagcagaaaccaagtctacttcactaatgacgatgccgtgtgtctcgtctcctgacatgtctcacagacgctcctgaagttaggt

SEQ ID NO: 3600 - DNA, 201 bp, Homo sapiens
ggatgaggaggagctcttccactccatccgcatggacaatcccttttacccacggtggctggagaaggaagcaaaggaccttctggtgaagctcttcgtgmgagaacctgagaagaggctgggcgtgaggggagacatccgccagcaccctttgtttcgggagatcaactgggaggaacttgaacggaaggagattgaccc

SEQ ID NO: 3601 - DNA, 201 bp, Homo sapiens
tggtcttgatggacgatgatgttgagtgcacgatggtagagaagagagttctttccttggcctgggagcatccgtttctgacgcacatgttttgtacattycagaccaaggaaaacctcttttttgtgatggagtacctcaacggaggggacttaatgtaccacatccaaagctgccacaagttcgacctttccagagcga

SEQ ID NO: 3602 - DNA, 201 bp, Homo sapiens
gagatgccaagacgaataccttctgtgggacacctgactacatcgccccagagatcttgctgggtcagaaatacaaccactctgtggactggtggtccttyggggttctcctttatgaaatgctgattggtcagtcgcctttccacgggcaggatgaggaggagctcttccactccatccgcatggacaatcccttttacc

SEQ ID NO: 3603 - DNA, 201 bp, Homo sapiens
aggccttaaagaaagatgtggtcttgatggacgatgatgttgagtgcacgatggtagagaagagagttctttccttggcctgggagcatccgtttctgacrcacatgttttgtacattccagaccaaggaaaacctcttttttgtgatggagtacctcaacggaggggacttaatgtaccacatccaaagctgccacaagt

SEQ ID NO: 3604 - DNA, 201 bp, Homo sapiens
agacaggaaagaatttgccttctccctgggaactggttcaagagacactgcttgggttcctttttcaacttggaaaaagaaagaaacactcaacaataaakactgagacccgttcgcccccatgtgacttttatctgtagcagaaaccaagtctacttcactaatgacgatgccgtgtgtctcgtctcctgacatgtctca

SEQ ID NO: 3605 - DNA, 201 bp, Homo sapiens
aagactgaaacggccccattgcctggtctagtagcggatctcactcagccgcagacaagtaatcactaacccgttttattctattcctatctgtggatgtrtaaatggctggggggccagccctggataggtttttatgggaattctttacaataaacatagcttgtaacttgagatctacaaatccattcatcctgattg

SEQ ID NO: 3606 - DNA, 201 bp, Homo sapiens
gttatttacttgaaagatgggtctccgcacttggaaaggtttcaagacttgatactgcaataaattatggctcttcacctgggcgccaactgctgatcaaygaaatgcttgttgaatcaggggcaaacggagtacagacgtctcaagactgaaacggccccattgcctggtctagtagcggatctcactcagccgcagaca

SEQ ID NO: 3607 - DNA, 201 bp, Homo sapiens
aaattatggctcttcacctgggcgccaactgctgatcaatgaaatgcttgttgaatcaggggcaaacggagtacagacgtctcaagactgaaacggccccrttgcctggtctagtagcggatctcactcagccgcagacaagtaatcactaacccgttttattctattcctatctgtggatgtgtaaatggctggggggcc

SEQ ID NO: 3608 - DNA, 201 bp, Homo sapiens
agcactcaacaggctcgctgcttaagagatactgaacagatcttcagagaaggtccggttgaaattggtctcccatgctccatcaaaaatgaagcaaggcygccatgtttaccgacaccgggaaaaagagagcctcagggcatttcctgggagtctccgttggatgaggtggataaaatgtgccatcttccagaacctgaa

SEQ ID NO: 3609 - DNA, 201 bp, Homo sapiens
ctccagtattggcacagtcactcactgccattctcacactataacaagaaaagaaatgaagtgcataagtctcctgggaaaagaaccttaaccccttctcrtgccatgactggtgatttcatgactcataagcccctccgtaggcatcattcaagatcaatggcccatgcatgctgtttgcagcagtcaattgagttgaat

SEQ ID NO: 3610 - DNA, 201 bp, Homo sapiens
aaatcattcttggtctgcagttccttcattccaaaggaatagtctacagggacctgaagctagataacatcctgttagacaaagatggacatatcaagatygcggattttggaatgtgcaaggagaacatgttaggagatgccaagacgaataccttctgtgggacacctgactacatcgccccagagatcttgctgggtc

SEQ ID NO: 3611 - DNA, 201 bp, Homo sapiens
gtgatgcatgtggcatgaatgtgcatcatagatgccagacaaaggtggccaacctttgtggcataaaccagaagctaatggctgaagcgctggccatgatwgagagcactcaacaggctcgctgcttaagagatactgaacagatcttcagagaaggtccggttgaaattggtctcccatgctccatcaaaaatgaagcaa

SEQ ID NO: 3612 - DNA, 201 bp, Homo sapiens; identical to SEQ ID NO: 3596

SEQ ID NO: 3613 - DNA, 133 bp, Homo sapiens; identical to SEQ ID NO: 3597

SEQ ID NO: 3614 - DNA, 201 bp, Homo sapiens; identical to SEQ ID NO: 3598

SEQ ID NO: 3615 - DNA, 201 bp, Homo sapiens; identical to SEQ ID NO: 3599

SEQ ID NO: 3616 - DNA, 201 bp, Homo sapiens; identical to SEQ ID NO: 3600

SEQ ID NO: 3617 - DNA, 201 bp, Homo sapiens; identical to SEQ ID NO: 3601

SEQ ID NO: 3618 - DNA, 201 bp, Homo sapiens; identical to SEQ ID NO: 3602

SEQ ID NO: 3619 - DNA, 201 bp, Homo sapiens; identical to SEQ ID NO: 3603

SEQ ID NO: 3620 - DNA, 201 bp, Homo sapiens; identical to SEQ ID NO: 3604

SEQ ID NO: 3621 - DNA, 201 bp, Homo sapiens; identical to SEQ ID NO: 3605

SEQ ID NO: 3622 - DNA, 201 bp, Homo sapiens; identical to SEQ ID NO: 3606

SEQ ID NO: 3623 - DNA, 201 bp, Homo sapiens; identical to SEQ ID NO: 3607

SEQ ID NO: 3624 - DNA, 201 bp, Homo sapiens; identical to SEQ ID NO: 3608

SEQ ID NO: 3625 - DNA, 201 bp, Homo sapiens; identical to SEQ ID NO: 3609

SEQ ID NO: 3626 - DNA, 201 bp, Homo sapiens; identical to SEQ ID NO: 3610

SEQ ID NO: 3627 - DNA, 201 bp, Homo sapiens; identical to SEQ ID NO: 3611

SEQ ID NO: 3628 - DNA, 201 bp, Homo sapiens; identical to SEQ ID NO: 3596

SEQ ID NO: 3629 - DNA, 201 bp, Homo sapiens; identical to SEQ ID NO: 3608

SEQ ID NO: 3630 - DNA, 140 bp, Homo sapiens
tggtcttgatggacgatgatgttgagtgcacgatggtagagaagagagttctttccttggcctgggagcatccgtttctgacgcacatgttttgtacattycagaccaaggtatggcttctgctccgacaaccctacctc

SEQ ID NO: 3631 - DNA, 158 bp, Homo sapiens
aggccttaaagaaagatgtggtcttgatggacgatgatgttgagtgcacgatggtagagaagagagttctttccttggcctgggagcatccgtttctgacrcacatgttttgtacattccagaccaaggtatggcttctgctccgacaaccctacctc

SEQ ID NO: 3632 - DNA, 201 bp, Homo sapiens; identical to SEQ ID NO: 3611

SEQ ID NO: 3633 - DNA, 201 bp, Homo sapiens; identical to SEQ ID NO: 3596

SEQ ID NO: 3634 - DNA, 133 bp, Homo sapiens; identical to SEQ ID NO: 3597

SEQ ID NO: 3635 - DNA, 201 bp, Homo sapiens; identical to SEQ ID NO: 3598

SEQ ID NO: 3636 - DNA, 201 bp, Homo sapiens; identical to SEQ ID NO: 3599

SEQ ID NO: 3637 - DNA, 201 bp, Homo sapiens; identical to SEQ ID NO: 3600

SEQ ID NO: 3638 - DNA, 201 bp, Homo sapiens; identical to SEQ ID NO: 3601

SEQ ID NO: 3639 - DNA, 201 bp, Homo sapiens; identical to SEQ ID NO: 3602

SEQ ID NO: 3640 - DNA, 201 bp, Homo sapiens; identical to SEQ ID NO: 3603

SEQ ID NO: 3641 - DNA, 201 bp, Homo sapiens; identical to SEQ ID NO: 3604

SEQ ID NO: 3642 - DNA, 201 bp, Homo sapiens; identical to SEQ ID NO: 3605

SEQ ID NO: 3643 - DNA, 201 bp, Homo sapiens; identical to SEQ ID NO: 3606

SEQ ID NO: 3644 - DNA, 201 bp, Homo sapiens; identical to SEQ ID NO: 3607

SEQ ID NO: 3645 - DNA, 201 bp, Homo sapiens; identical to SEQ ID NO: 3608

SEQ ID NO: 3646 - DNA, 201 bp, Homo sapiens; identical to SEQ ID NO: 3609

SEQ ID NO: 3647 - DNA, 201 bp, Homo sapiens; identical to SEQ ID NO: 3610

SEQ ID NO: 3648 - DNA, 201 bp, Homo sapiens; identical to SEQ ID NO: 3611

SEQ ID NO: 3649 - DNA, 201 bp, Homo sapiens
caagacccctatctctaaaaagaataaaaaattaaacaaattttaaaataaaaaataacttttaaaagaaggctctcatgcccccttagtaatgctttctkatcactgtggtgagttctagaatacttggctttctctgactcaagtaaatgggtttttgagcaccctgaaaccctctacgcctgggagggggcctgcgtc

SEQ ID NO: 3650 - DNA, 201 bp, Homo sapiens
cggtgaaggtccagcactcgggtgcctactggtgccaggggaccaacagtgtgggcaagggccgttcgcctctcagcaccctcaccgtctactatagcccrgagaccatcggcaggcgagtggctgtgggactcgggtcctgcctcgccatcctcatcctggcaatctgtgggctcaagctccagcgacgttggaagagga

SEQ ID NO: 3651 - DNA, 201 bp, Homo sapiens
agtgatggaggggaagagtgcaaccctgacctgtgagagcgacgccaaccctcccgtctcccactacacctggtttgactggaataaccaaagcctccccyaccacagccagaagctgagattggagccggtgaaggtccagcactcgggtgcctactggtgccaggggaccaacagtgtgggcaagggccgttcgcctct

SEQ ID NO: 3652 - DNA, 201 bp, Homo sapiens
aaaaggttagaagggcccccctctctgaagacccccactccctgggatgctacaatccaatgatggaagatggcattagctacaccaccctgcgctttccmgagatgaacataccacgaactggagatgcagagtcctcagagatgcagagacctcccccggactgcgatgacacggtcacttattcagcattgcacaagc

SEQ ID NO: 3653 - DNA, 201 bp, Homo sapiens
ggacacttgaagtgctgtatgcacccaggaggctgcgtgtgtccatgagcccgggggaccaagtgatggaggggaagagtgcaaccctgacctgtgagagygacgccaaccctcccgtctcccactacacctggtttgactggaataaccaaagcctcccctaccacagccagaagctgagattggagccggtgaaggtcc

SEQ ID NO: 3654 - DNA, 201 bp, Homo sapiens
tggaagaggacacagagccagcaggggcttcaggagaattccagcggccagagcttctttgtgaggaataaaaaggttagaagggcccccctctctgaagrcccccactccctgggatgctacaatccaatgatggaagatggcattagctacaccaccctgcgctttcccgagatgaacataccacgaactggagatgca

SEQ ID NO: 3655 - DNA, 201 bp, Homo sapiens
cagtttctgcctctgagggaaagcccagaaaaggacagaaacgaagtagaaaggggcccagtcctggcctggcttctcctttggaagtgaggcattgcacrgggagacgtacgtatcagcggccccttgactctggggactccgggtttgagatggacacactggtgtggattaacctgccagggagacagagctcacaat

SEQ ID NO: 3656 - DNA, 201 bp, Homo sapiens
cgagattcactctggaaactcggtcagcctccaatgtgacttctcaagcagccaccccaaagaagtccagttcttctgggagaaaaatggcaggcttctgrggaaagaaagccagctgaattttgactccatctccccagaagatgctgggagttacagctgctgggtgaacaactccataggacagacagcgtccaaggc

SEQ ID NO: 3657 - DNA, 201 bp, Homo sapiens
tctccatctctctggccctctacccctgatctgacatccccactcacgaatattatgcccagtttctgcctctgagggaaagcccagaaaaggacagaaaygaagtagaaaggggcccagtcctggcctggcttctcctttggaagtgaggcattgcacggggagacgtacgtatcagcggccccttgactctggggactc

SEQ ID NO: 3658 - DNA, 201 bp, Homo sapiens
caatcctcttccaacaaattacacgtggtaccacaatgggaaagaaatgcagggaaggacagaggagaaagtccacatcccaaagatcctcccctggcacrctgggacttattcctgtgtggcagaaaacattcttggtactggacagaggggcccgggagctgagctggatgtccagtatcctcccaagaaggtgaccac

SEQ ID NO: 3659 - DNA, 201 bp, Homo sapiens
aaaccctctacgcctgggagggggcctgcgtctggatcccctgcacctacagagccctagatggtgacctggaaagcttcatcctgttccacaatcctgartataacaagaacacctcgaagtttgatgggacaagactctatgaaagcacaaaggatgggaaggttccttctgagcagaaaagggtgcaattcctgggag

SEQ ID NO: 3660 - DNA, 201 bp, Homo sapiens
agaggagaaagtccacatcccaaagatcctcccctggcacgctgggacttattcctgtgtggcagaaaacattcttggtactggacagaggggcccgggarctgagctggatgtccagtatcctcccaagaaggtgaccacagtgattcaaaaccccatgccgattcgagaaggagacacagtgaccctttcctgtaacta

SEQ ID NO: 3661 - DNA, 201 bp, Homo sapiens
cactgggggcagcgggggccagggaagtccccgagtttccccagacaccgccacatggcttcctcctgcgcgcatgtgcgcacacacacacacacacgcasacacacacacacacactcactgcggagaaccttgtgcctggctcagagccagtctttttggtgagggtaaccccaaacctccaaaactcctgcccctgtt

SEQ ID NO: 3662 - DNA, 201 bp, Homo sapiens
ggatgggctgcagcagaggcactgggggcagcgggggccagggaagtccccgagtttccccagacaccgccacatggcttcctcctgcgcgcatgtgcgcrcacacacacacacacgcacacacacacacacacactcactgcggagaaccttgtgcctggctcagagccagtctttttggtgagggtaaccccaaacctc

SEQ ID NO: 3663 - DNA, 201 bp, Homo sapiens
ttacccggtatgaatggaaaccccatggcgcctgggaggagccatcgcttggggtgctgaagatccaaaacgttggctgggacaacacaaccatcgcctgygcagcttgtaatagttggtgctcgtgggcctcccctgtcgccctgaatgtccagtatgccccccgagacgtgagggtccggaaaatcaagcccctttccg

SEQ ID NO: 3664 - DNA, 201 bp, Homo sapiens
gaaagtccacatcccaaagatcctcccctggcacgctgggacttattcctgtgtggcagaaaacattcttggtactggacagaggggcccgggagctgagytggatgtccagtatcctcccaagaaggtgaccacagtgattcaaaaccccatgccgattcgagaaggagacacagtgaccctttcctgtaactacaattc

SEQ ID NO: 3665 - DNA, 201 bp, Homo sapiens
cccagcactttgggaggccaaggcgggaggatcacttgaggtcaggagttcaagaccagcctggccaacatggcgaaaccctgtctctactagaaatacaraaaaattagctgggtgtggtggtgggcacctgtaatcccagctactcgggaggctgaggcaggaggatcacttgaactggggaggtagaggttacagcga

SEQ ID NO: 3666 - DNA, 201 bp, Homo sapiens
aaagcaggactggagagaggtggaatgaagtggcaaggggttcctgaggggtgatttgggacaggacatctaaagccaggtgtacgctcacgtcctcagtsccccaggctcctgcacgggctctgttcttttgcagaaaggccttttccacctcatatccagctccctccagaaattcaagagtcccaggaagtcactctg

SEQ ID NO: 3667 - DNA, 201 bp, Homo sapiens
agtcaccatgggaagattgtgacctgccagcttcaggatgcagatgggaagttcctctccaatgacacggtgcagctgaacgtgaagcgtgagtctccccrgcatgcctgtgggaagggcaaggtctgtgtcaccttctccccagccccgcagggggcatgcacccagggcagggggaagcctgcacagacggcggcatcc

SEQ ID NO: 3668 - DNA, 201 bp, Homo sapiens
cggtgaaggtccagcactcgggtgcctactggtgccaggggaccaacagtgtgggcaagggccgttcgcctctcagcaccctcaccgtctactatagcccrgagaccatcggcaggcgagtggctgtgggactcgggtcctgcctcgccatcctcatcctggcaatctgtgggctcaagctccagcgacgagatgcagagt

SEQ ID NO: 3669 - DNA, 201 bp, Homo sapiens; identical to SEQ ID NO: 3651

SEQ ID NO: 3670 - DNA, 201 bp, Homo sapiens; identical to SEQ ID NO: 3658

SEQ ID NO: 3671 - DNA, 201 bp, Homo sapiens; identical to SEQ ID NO: 3653

SEQ ID NO: 3672 - DNA, 201 bp, Homo sapiens; identical to SEQ ID NO: 3659

SEQ ID NO: 3673 - DNA, 201 bp, Homo sapiens; identical to SEQ ID NO: 3660

SEQ ID NO: 3674 - DNA, 201 bp, Homo sapiens; identical to SEQ ID NO: 3663

SEQ ID NO: 3675 - DNA, 201 bp, Homo sapiens; identical to SEQ ID NO: 3664

SEQ ID NO: 3676 - DNA, 201 bp, Homo sapiens; identical to SEQ ID NO: 3656

SEQ ID NO: 3677 - DNA, 201 bp, Homo sapiens; identical to SEQ ID NO: 3650

SEQ ID NO: 3678 - DNA, 201 bp, Homo sapiens; identical to SEQ ID NO: 3652

SEQ ID NO: 3679 - DNA, 201 bp, Homo sapiens; identical to SEQ ID NO: 3651

SEQ ID NO: 3680 - DNA, 177 bp, Homo sapiens
ggactgcgttgggtgcagtggttcccgcctgtaaccccagcactttgggaggctgagatcggaggatcgtttgagcycaggagtttgagaccagcctgggtaacatggcaagaccctgtctctacaaaatgtttaaaaaactagctaggtgtggtggcttacacctgtaatcccagc

SEQ ID NO: 3681 - DNA, 201 bp, Homo sapiens; identical to SEQ ID NO: 3653

SEQ ID NO: 3682 - DNA, 201 bp, Homo sapiens; identical to SEQ ID NO: 3654

SEQ ID NO: 3683 - DNA, 201 bp, Homo sapiens; identical to SEQ ID NO: 3665

SEQ ID NO: 3684 - DNA, 201 bp, Homo sapiens; identical to SEQ ID NO: 3656

SEQ ID NO: 3685 - DNA, 108 bp, Homo sapiens
ggactgcrttgggtgcagtggttcccgcctgtaaccccagcactttgggaggctgagatcggaggatcgtttgagcccaggagtttgagaccagcctgggtaacatgg

SEQ ID NO: 3686 - DNA, 201 bp, Homo sapiens; identical to SEQ ID NO: 3666

SEQ ID NO: 3687 - DNA, 201 bp, Homo sapiens; identical to SEQ ID NO: 3663

SEQ ID NO: 3688 - DNA, 201 bp, Homo sapiens; identical to SEQ ID NO: 3650

SEQ ID NO: 3689 - DNA, 201 bp, Homo sapiens; identical to SEQ ID NO: 3652

SEQ ID NO: 3690 - DNA, 201 bp, Homo sapiens; identical to SEQ ID NO: 3651

SEQ ID NO: 3691 - DNA, 201 bp, Homo sapiens; identical to SEQ ID NO: 3653

SEQ ID NO: 3692 - DNA, 201 bp, Homo sapiens; identical to SEQ ID NO: 3654

SEQ ID NO: 3693 - DNA, 201 bp, Homo sapiens; identical to SEQ ID NO: 3655

SEQ ID NO: 3694 - DNA, 201 bp, Homo sapiens; identical to SEQ ID NO: 3656

SEQ ID NO: 3695 - DNA, 201 bp, Homo sapiens; identical to SEQ ID NO: 3657

SEQ ID NO: 3696 - DNA, 201 bp, Homo sapiens; identical to SEQ ID NO: 3658

SEQ ID NO: 3697 - DNA, 201 bp, Homo sapiens; identical to SEQ ID NO: 3659

SEQ ID NO: 3698 - DNA, 201 bp, Homo sapiens; identical to SEQ ID NO: 3660

SEQ ID NO: 3699 - DNA, 201 bp, Homo sapiens; identical to SEQ ID NO: 3661

SEQ ID NO: 3700 - DNA, 201 bp, Homo sapiens; identical to SEQ ID NO: 3662

SEQ ID NO: 3701 - DNA, 201 bp, Homo sapiens; identical to SEQ ID NO: 3664

SEQ ID NO: 3702 - DNA, 201 bp, Homo sapiens; identical to SEQ ID NO: 3663

SEQ ID NO: 3703 - DNA, 201 bp, Homo sapiens; identical to SEQ ID NO: 3650

SEQ ID NO: 3704 - DNA, 201 bp, Homo sapiens; identical to SEQ ID NO: 3652

SEQ ID NO: 3705 - DNA, 201 bp, Homo sapiens; identical to SEQ ID NO: 3651

SEQ ID NO: 3706 - DNA, 201 bp, Homo sapiens; identical to SEQ ID NO: 3653

SEQ ID NO: 3707 - DNA, 201 bp, Homo sapiens; identical to SEQ ID NO: 3654

SEQ ID NO: 3708 - DNA, 201 bp, Homo sapiens; identical to SEQ ID NO: 3656

SEQ ID NO: 3709 - DNA, 201 bp, Homo sapiens; identical to SEQ ID NO: 3658

SEQ ID NO: 3710 - DNA, 201 bp, Homo sapiens; identical to SEQ ID NO: 3660

SEQ ID NO: 3711 - DNA, 201 bp, Homo sapiens; identical to SEQ ID NO: 3659

SEQ ID NO: 3712 - DNA, 201 bp, Homo sapiens; identical to SEQ ID NO: 3663

SEQ ID NO: 3713 - DNA, 201 bp, Homo sapiens; identical to SEQ ID NO: 3664

SEQ ID NO: 3714 - DNA, 201 bp, Homo sapiens
ctgcagtcaatgatcaccgctgtgggcatccctgaggtcatgtctcggctcgaggtagtgtttacagccctcatgaacagcaaaggcgtgagcctcttcgrcatcatcaaccctgagattatcactcgagatggcttcctgctgctgcagatggactttggcttccctgagcacctgctggtggatttcctccagagcttg

SEQ ID NO: 3715 - DNA, 201 bp, Homo sapiens
ccaggcctcctattctaagaaaaagctcttcttaagcctcttggatttccagattacaccaaagactgtttccaacttgactgagagcagctccgagtccrtccagagcttcctgcagtcaatgatcaccgctgtgggcatccctgaggtcatgtctcggctcgaggtagtgtttacagccctcatgaacagcaaaggcgt

SEQ ID NO: 3716 - DNA, 201 bp, Homo sapiens
tctacaagaatgtctcagaggacctccccctccccaccttctcgcccacactgctgggggactcccgcatgctgtacttctggttctctgagcgagtcttycactcgctggccaaggtagctttccaggatggccgcctcatgctcagcctgatgggagacgagttcaaggcagtgctggagacctggggcttcaacacca

SEQ ID NO: 3717 - DNA, 201 bp, Homo sapiens
tgcctggtggctgggtattgatcagtccattgacttcgagatcgactctgccattgacctccagatcaacacacagctgacctgtgactctggtagagtgyggaccgatgcccctgactgctacctgtctttccataagctgctcctgcatctccaaggggagcgagagcctgggtggatcaagcagctgttcacaaattt

SEQ ID NO: 3718 - DNA, 201 bp, Homo sapiens
agctgacctgtgactctggtagagtgcggaccgatgcccctgactgctacctgtctttccataagctgctcctgcatctccaaggggagcgagagcctggrtggatcaagcagctgttcacaaatttcatctccttcaccctgaagctggtcctgaagggacagatctgcaaagagatcaacgtcatctctaacatcatgg

SEQ ID NO: 3719 - DNA, 201 bp, Homo sapiens
atatacgggctccaggctgaacggctcgggccacttacacaccactgcctgataaccatgctggctgccacagtcctgaccctggccctgctgggcaatgsccatgcctgctccaaaggcacctcgcacgaggcaggcatcgtgtgccgcatcaccaagcctgccctcctggtgttgaaccacgagactgccaaggtgatc

SEQ ID NO: 3720 - DNA, 201 bp, Homo sapiens
ctgccagcatcctttcagatggagacattggggtggacatttccctgacaggtgatcccgtcatcacagcctcctacctggagtcccatcacaagggtcayttcatctacaagaatgtctcagaggacctccccctccccaccttctcgcccacactgctgggggactcccgcatgctgtacttctggttctctgagcgag

SEQ ID NO: 3721 - DNA, 166 bp, Homo sapiens
gtgaatctctggggccaggaagaccctgctgcccggaagagcctcatgttccgtgggggctgggcrgacatacatatacgggctccaggctgaacggctcgggccacttacacaccactgcctgataaccatgctggctgccacagtcctgaccctggccctgctg

SEQ ID NO: 3722 - DNA, 201 bp, Homo sapiens
tcatttcatctacaagaatgtctcagaggacctccccctccccaccttctcgcccacactgctgggggactcccgcatgctgtacttctggttctctgagygagtcttccactcgctggccaaggtagctttccaggatggccgcctcatgctcagcctgatgggagacgagttcaaggcagtgctggagacctggggctt

SEQ ID NO: 3723 - DNA, 201 bp, Homo sapiens
ggctcgggccacttacacaccactgcctgataaccatgctggctgccacagtcctgaccctggccctgctgggcaatgcccatgcctgctccaaaggcacmtcgcacgaggcaggcatcgtgtgccgcatcaccaagcctgccctcctggtgttgaaccacgagactgccaaggtgatccagaccgccttccagcgagcca

SEQ ID NO: 3724 - DNA, 201 bp, Homo sapiens
cgtccagagcttcctgcagtcaatgatcaccgctgtgggcatccctgaggtcatgtctcggctcgaggtagtgtttacagccctcatgaacagcaaaggcrtgagcctcttcgacatcatcaaccctgagattatcactcgagatggcttcctgctgctgcagatggactttggcttccctgagcacctgctggtggattt

SEQ ID NO: 3725 - DNA, 201 bp, Homo sapiens
ccataagctgctcctgcatctccaaggggagcgagagcctgggtggatcaagcagctgttcacaaatttcatctccttcaccctgaagctggtcctgaagkgacagatctgcaaagagatcaacgtcatctctaacatcatggccgattttgtccagacaagggctgccagcatcctttcagatggagacattggggtgga

SEQ ID NO: 3726 - DNA, 201 bp, Homo sapiens
actcccgcatgctgtacttctggttctctgagcgagtcttccactcgctggccaaggtagctttccaggatggccgcctcatgctcagcctgatgggagaygagttcaaggcagtgctggagacctggggcttcaacaccaaccaggaaatcttccaagaggttgtcggcggcttccccagccaggcccaagtcaccgtcc

SEQ ID NO: 3727 - DNA, 201 bp, Homo sapiens
ggtagctttccaggatggccgcctcatgctcagcctgatgggagacgagttcaaggcagtgctggagacctggggcttcaacaccaaccaggaaatcttcyaagaggttgtcggcggcttccccagccaggcccaagtcaccgtccactgcctcaagatgcccaagatctcctgccaaaacaagggagtcgtggtcaattc

SEQ ID NO: 3728 - DNA, 201 bp, Homo sapiens
ggatcaagcagctgttcacaaatttcatctccttcaccctgaagctggtcctgaagggacagatctgcaaagagatcaacgtcatctctaacatcatggcygattttgtccagacaagggctgccagcatcctttcagatggagacattggggtggacatttccctgacaggtgatcccgtcatcacagcctcctacctgg

SEQ ID NO: 3729 - DNA, 201 bp, Homo sapiens
tggccgcctcatgctcagcctgatgggagacgagttcaaggcagtgctggagacctggggcttcaacaccaaccaggaaatcttccaagaggttgtcggcrgcttccccagccaggcccaagtcaccgtccactgcctcaagatgcccaagatctcctgccaaaacaagggagtcgtggtcaattcttcagtgatggtgaa

SEQ ID NO: 3730 - DNA, 201 bp, Homo sapiens
ggtcaattcttcagtgatggtgaaattcctctttccacgcccagaccagcaacattctgtagcttacacatttgaagaggatatcgtgactaccgtccagscctcctattctaagaaaaagctcttcttaagcctcttggatttccagattacaccaaagactgtttccaacttgactgagagcagctccgagtccgtcca

SEQ ID NO: 3731 - DNA, 201 bp, Homo sapiens
gcctcttggatttccagattacaccaaagactgtttccaacttgactgagagcagctccgagtccgtccagagcttcctgcagtcaatgatcaccgctgtrggcatccctgaggtcatgtctcggctcgaggtagtgtttacagccctcatgaacagcaaaggcgtgagcctcttcgacatcatcaaccctgagattatca

SEQ ID NO: 3732 - DNA, 201 bp, Homo sapiens
caaaggcgtgagcctcttcgacatcatcaaccctgagattatcactcgagatggcttcctgctgctgcagatggactttggcttccctgagcacctgctgrtggatttcctccagagcttgagctagaagtctccaaggaggtcgggatggggcttgtagcagaaggcaagcaccaggctcacagctggaaccctggtgtc

SEQ ID NO: 3733 - DNA, 201 bp, Homo sapiens
atccctgaggtcatgtctcggctcgaggtagtgtttacagccctcatgaacagcaaaggcgtgagcctcttcgacatcatcaaccctgagattatcactcragatggcttcctgctgctgcagatggactttggcttccctgagcacctgctggtggatttcctccagagcttgagctagaagtctccaaggaggtcggga

SEQ ID NO: 3734 - DNA, 195 bp, Homo sapiens
tccagagcttgagctagaagtctccaaggaggtcgggatggggcttgtagcagaaggcaagcaccaggctcacagctggaaccctggtgtctcctccagcrtggtggaagttgggttaggagtacggagatggagattggctcccaactcctccctatcctaaaggcccactggcattaaagtgctgtatccaag

SEQ ID NO: 3735 - DNA, 201 bp, Homo sapiens; identical to SEQ ID NO: 3714

SEQ ID NO: 3736 - DNA, 201 bp, Homo sapiens; identical to SEQ ID NO: 3715

SEQ ID NO: 3737 - DNA, 201 bp, Homo sapiens; identical to SEQ ID NO: 3717

SEQ ID NO: 3738 - DNA, 201 bp, Homo sapiens; identical to SEQ ID NO: 3718

SEQ ID NO: 3739 - DNA, 201 bp, Homo sapiens; identical to SEQ ID NO: 3719

SEQ ID NO: 3740 - DNA, 201 bp, Homo sapiens; identical to SEQ ID NO: 3723

SEQ ID NO: 3741 - DNA, 166 bp, Homo sapiens; identical to SEQ ID NO: 3721

SEQ ID NO: 3742 - DNA, 201 bp, Homo sapiens; identical to SEQ ID NO: 3724

SEQ ID NO: 3743 - DNA, 201 bp, Homo sapiens; identical to SEQ ID NO: 3725

SEQ ID NO: 3744 - DNA, 201 bp, Homo sapiens
ttccctgacaggtgatcccgtcatcacagcctcctacctggagtcccatcacaaggcagtgctggagacctggggcttcaacaccaaccaggaaatcttcyaagaggttgtcggcggcttccccagccaggcccaagtcaccgtccactgcctcaagatgcccaagatctcctgccaaaacaagggagtcgtggtcaattc

SEQ ID NO: 3745 - DNA, 201 bp, Homo sapiens; identical to SEQ ID NO: 3728

SEQ ID NO: 3746 - DNA, 201 bp, Homo sapiens
tcccgtcatcacagcctcctacctggagtcccatcacaaggcagtgctggagacctggggcttcaacaccaaccaggaaatcttccaagaggttgtcggcrgcttccccagccaggcccaagtcaccgtccactgcctcaagatgcccaagatctcctgccaaaacaagggagtcgtggtcaattcttcagtgatggtgaa

SEQ ID NO: 3747 - DNA, 201 bp, Homo sapiens; identical to SEQ ID NO: 3730

SEQ ID NO: 3748 - DNA, 201 bp, Homo sapiens; identical to SEQ ID NO: 3731

SEQ ID NO: 3749 - DNA, 201 bp, Homo sapiens; identical to SEQ ID NO: 3732

SEQ ID NO: 3750 - DNA, 201 bp, Homo sapiens; identical to SEQ ID NO: 3733

SEQ ID NO: 3751 - DNA, 195 bp, Homo sapiens; identical to SEQ ID NO: 3734

SEQ ID NO: 3752 - DNA, 201 bp, Homo sapiens
aggccctgctccctctccagccttgacagcccctccccctgcctatgccaccctgggcccccgcccatctccagggggctctgcaggggccagttcctccrcctgtcctctgggggggccctgagagggaaggagaggtttctcacaccaaggcagatgctcctctggtgggagggtgctggccctggcaagattgaagga

SEQ ID NO: 3753 - DNA, 201 bp, Homo sapiens
ctccgaaggttccgaagccgatactggtctccaggccgagggggcaggggtgctcaggaggtagcctccaccctggcatcctcccctccttcccacttctkcccccaccccatgtctctgtccttgtcccagccaggccctgctccctctccagccttgacagcccctccccctgcctatgccaccctgggcccccgccca

SEQ ID NO: 3754 - DNA, 123 bp, Homo sapiens
tcgcttccatccctggccggccrgcgggcgggctccccagccaggccgctgcacctgtcaggggaacaagctggaggagcaggaccctagacctctgcagcccataccaggtctcatggaggg

SEQ ID NO: 3755 - DNA, 201 bp, Homo sapiens
aaggagctgaactacaaaaccaattctgagtctccctctgtcacgatggtcaccctcctgtccaacctgggcagccagtggagcctgtggttcggctcctyggtgttgtctgtggtggagatggctgagctcgtctttgacctgctggtcatcatgttcctcatgctgctccgaaggttccgaagccgatactggtctcca

SEQ ID NO: 3756 - DNA, 201 bp, Homo sapiens
gatgtatggaaactgctatactttcaatgacaagaacaactccaacctctggatgtcttccatgcctggaatcaacaacggtctgtccctgatgctgcgcrcagagcagaatgacttcattcccctgctgtccacagtgactggggcccgggtaatggtgcacgggcaggatgaacctgcctttatggatgatggtggctt

SEQ ID NO: 3757 - DNA, 201 bp, Homo sapiens
attactctcacttccaccacccgatgtatggaaactgctatactttcaatgacaagaacaactccaacctctggatgtcttccatgcctggaatcaacaayggtctgtccctgatgctgcgcgcagagcagaatgacttcattcccctgctgtccacagtgactggggcccgggtaatggtgcacgggcaggatgaacctg

SEQ ID NO: 3758 - DNA, 188 bp, Homo sapiens
tcgcttccatccctggccggccagcgggcgggctccccagccaggccgctgcacctgtcaggggaacaagctggaggagcaggacccyagacctctgcagcccataccaggtctcatggaggggaacaagctggaggagcaggactctagccctccacagtccactccagggctcatgaaggggaaca

SEQ ID NO: 3759 - DNA, 201 bp, Homo sapiens
ggggaacaagcgtgaggagcaggggctgggccccgaacctgcggcgccccagcagcccacggcggaggaggaggccctgatcgagttccaccgctcctacygagagctcttcgagttcttctgcaacaacaccaccatccacggcgccatccgcctggtgtgctcccagcacaaccgcatgaagacggccttctgggcagt

SEQ ID NO: 3760 - DNA, 201 bp, Homo sapiens
ttgacttctcctcagaccacctgggctgtttcaccaagtgccggaagccatgcagcgtgaccagctaccagctctctgctggttactcacgatggccctckgtgacatcccaggaatgggtcttccagatgctatcgcgacagaacaattacaccgtcaacaacaagagaaatggagtggccaaagtcaacatcttcttca

SEQ ID NO: 3761 - DNA, 201 bp, Homo sapiens
ctactgcccctcgctaggaatatgggcctcgcaggtcggcagcgtgaggtcctctgtgccaccttccatcagtaggaacccagccatggtgaacgaagccwgaggaaacagcagcctcaacccctgcttggagggcagtgccagcagtggcagtgagagctccaaagatagttcgagatgttccaccccgggcctggaccc

SEQ ID NO: 3762 - DNA, 201 bp, Homo sapiens
accatcctgcacatgacctgctgccgtcagcgcctggaggagatcacgggccatctgcacaaagctaagcagctgggcctgaagaacatcatggcgctgcrgggagacccaataggtgaccagtgggaagaggaggagggaggcttcaactacgcagtggacctggtgaagcacatccgaagtgagtttggtgactacttt

SEQ ID NO: 3763 - DNA, 201 bp, Homo sapiens
gccagcagtggcagtgagagctccaaagatagttcgagatgttccaccccgggcctggaccccgagcggcatgagagactccgggagaagatgaggcggcrattggaatctggtgacaagtggttctccctggaattcttccctcctcgaactgctgagggagctgtcaatctcatctcaaggtttgaccggatggcagca

SEQ ID NO: 3764 - DNA, 201 bp, Homo sapiens
actactacctcttctacctgaagagcaagtcccccaaggaggagctgctgaagatgtggggggaggagctgaccagtgaagaaagtgtctttgaagtcttygttctttacctctcgggagaaccaaaccggaatggtcacaaagtgacttgcctgccctggaacgatgagcccctggcggctgagaccagcctgctgaagg

SEQ ID NO: 3765 - DNA, 201 bp, Homo sapiens
gcctttggggagctgaaggactactacctcttctacctgaagagcaagtcccccaaggaggagctgctgaagatgtggggggaggagctgaccagtgaagmaagtgtctttgaagtctttgttctttacctctcgggagaaccaaaccggaatggtcacaaagtgacttgcctgccctggaacgatgagcccctggcggct

SEQ ID NO: 3766 - DNA, 201 bp, Homo sapiens
gcaattcctcttcccctgcctttggggagctgaaggactactacctcttctacctgaagagcaagtcccccaaggaggagctgctgaagatgtggggggakgagctgaccagtgaagaaagtgtctttgaagtctttgttctttacctctcgggagaaccaaaccggaatggtcacaaagtgacttgcctgccctggaacg

SEQ ID NO: 3767 - DNA, 201 bp, Homo sapiens
gatggcagcaggtggccccctctacatagacgtgacctggcacccagcaggtgaccctggctcagacaaggagacctcctccatgatgatcgccagcaccrccgtgaactactgtggcctggagaccatcctgcacatgacctgctgccgtcagcgcctggaggagatcacgggccatctgcacaaagctaagcagctggg

SEQ ID NO: 3768 - DNA, 201 bp, Homo sapiens
tgaactgcagccgaatgctgtcacttggggcatcttccctgggcgagagatcatccagcccaccgtagtggatcccgtcagcttcatgttctggaaggacraggcctttgccctgtggattgagcggtggggaaagctgtatgaggaggagtccccgtcccgcaccatcatccagtacatccacgacaactacttcctggt

SEQ ID NO: 3769 - DNA, 201 bp, Homo sapiens
ccgcgagatggctaccacagaggtgctgaagcgcctggggatgtggactgaggaccccaggcgtcccctaccctgggctctcagcgcccaccccaagcgcygagaggaagatgtacgtcccatcttctgggcctccagaccaaagagttacatctaccgtacccaggagtgggacgagttccctaacggccgctggggcaa

SEQ ID NO: 3770 - DNA, 201 bp, Homo sapiens
gaggaaacagcagcctcaacccctgcttggagggcagtgccagcagtggcagtgagagctccaaagatagttcgagatgttccaccccgggcctggacccygagcggcatgagagactccgggagaagatgaggcggcgattggaatctggtgacaagtggttctccctggaattcttccctcctcgaactgctgagggag

SEQ ID NO: 3771 - DNA, 201 bp, Homo sapiens
tgtgtggcaggttaccccaaaggccaccccgaagcagggagctttgaggctgacctgaagcacttgaaggagaaggtgtctgcgggagccgatttcatcaycacgcagcttttctttgaggctgacacattcttccgctttgtgaaggcatgcaccgacatgggcatcacttgccccatcgtccccgggatctttcccatc

SEQ ID NO: 3772 - DNA, 201 bp, Homo sapiens
acttctacaccctcaaccgcgagatggctaccacagaggtgctgaagcgcctggggatgtggactgaggaccccaggcgtcccctaccctgggctctcagygcccaccccaagcgccgagaggaagatgtacgtcccatcttctgggcctccagaccaaagagttacatctaccgtacccaggagtgggacgagttcccta

SEQ ID NO: 3773 - DNA, 201 bp, Homo sapiens
caccccaagcgccgagaggaagatgtacgtcccatcttctgggcctccagaccaaagagttacatctaccgtacccaggagtgggacgagttccctaacgrccgctggggcaattcctcttcccctgcctttggggagctgaaggactactacctcttctacctgaagagcaagtcccccaaggaggagctgctgaagatg

SEQ ID NO: 3774 - DNA, 201 bp, Homo sapiens
gtggcaggttaccccaaaggccaccccgaagcagggagctttgaggctgacctgaagcacttgaaggagaaggtgtctgcgggagccgatttcatcatcaygcagcttttctttgaggctgacacattcttccgctttgtgaaggcatgcaccgacatgggcatcacttgccccatcgtccccgggatctttcccatccag

SEQ ID NO: 3775 - DNA, 201 bp, Homo sapiens
aagcagggagctttgaggctgacctgaagcacttgaaggagaaggtgtctgcgggagccgatttcatcatcacgcagcttttctttgaggctgacacattyttccgctttgtgaaggcatgcaccgacatgggcatcacttgccccatcgtccccgggatctttcccatccagggctaccactcccttcggcagcttgtga

SEQ ID NO: 3776 - DNA, 201 bp, Homo sapiens
tactttgacatctgtgtggcaggttaccccaaaggccaccccgaagcagggagctttgaggctgacctgaagcacttgaaggagaaggtgtctgcgggagycgatttcatcatcacgcagcttttctttgaggctgacacattcttccgctttgtgaaggcatgcaccgacatgggcatcacttgccccatcgtccccggg

SEQ ID NO: 3777 - DNA, 201 bp, Homo sapiens
tggggcatcttccctgggcgagagatcatccagcccaccgtagtggatcccgtcagcttcatgttctggaaggacgaggcctttgccctgtggattgagcrgtggggaaagctgtatgaggaggagtccccgtcccgcaccatcatccagtacatccacgacaactacttcctggtcaacctggtggacaatgacttccca

SEQ ID NO: 3778 - DNA, 201 bp, Homo sapiens
gagctccgggttaattaccaccttgtcaatgtgaagggtgaaaacatcaccaatgcccctgaactgcagccgaatgctgtcacttggggcatcttccctgrgcgagagatcatccagcccaccgtagtggatcccgtcagcttcatgttctggaaggacgaggcctttgccctgtggattgagcggtggggaaagctgtat

SEQ ID NO: 3779 - DNA, 201 bp, Homo sapiens
gctccgggttaattaccaccttgtcaatgtgaagggtgaaaacatcaccaatgcccctgaactgcagccgaatgctgtcacttggggcatcttccctgggygagagatcatccagcccaccgtagtggatcccgtcagcttcatgttctggaaggacgaggcctttgccctgtggattgagcggtggggaaagctgtatga

SEQ ID NO: 3780 - DNA, 201 bp, Homo sapiens
gatgctgccatccgcaactatggcatcgagctggccgtgagcctgtgccaggagcttctggccagtggcttggtgccaggcctccacttctacaccctcarccgcgagatggctaccacagaggtgctgaagcgcctggggatgtggactgaggaccccaggcgtcccctaccctgggctctcagcgcccaccccaagcgc

SEQ ID NO: 3781 - DNA, 201 bp, Homo sapiens
tgcccctgaactgcagccgaatgctgtcacttggggcatcttccctgggcgagagatcatccagcccaccgtagtggatcccgtcagcttcatgttctggwaggacgaggcctttgccctgtggattgagcggtggggaaagctgtatgaggaggagtccccgtcccgcaccatcatccagtacatccacgacaactactt

SEQ ID NO: 3782 - DNA, 201 bp, Homo sapiens
aggaccccaggcgtcccctaccctgggctctcagcgcccaccccaagcgccgagaggaagatgtacgtcccatcttctgggcctccagaccaaagagttasatctaccgtacccaggagtgggacgagttccctaacggccgctggggcaattcctcttcccctgcctttggggagctgaaggactactacctcttctacc

SEQ ID NO: 3783 - DNA, 201 bp, Homo sapiens
agtgccagcagtggcagtgagagctccaaagatagttcgagatgttccaccccgggcctggaccccgagcggcatgagagactccgggagaagatgaggcsgcgattggaatctggtgacaagtggttctccctggaattcttccctcctcgaactgctgagggagctgtcaatctcatctcaaggtttgaccggatggca

SEQ ID NO: 3784 - DNA, 201 bp, Homo sapiens
aacgatgctgccatccgcaactatggcatcgagctggccgtgagcctgtgccaggagcttctggccagtggcttggtgccaggcctccacttctacacccycaaccgcgagatggctaccacagaggtgctgaagcgcctggggatgtggactgaggaccccaggcgtcccctaccctgggctctcagcgcccaccccaag

SEQ ID NO: 3785 - DNA, 201 bp, Homo sapiens
aacctggtggacaatgacttcccactggacaactgcctctggcaggtggtggaagacacattggagcttctcaacaggcccacccagaatgcgagagaaayggaggctccatgaccctgcgtcctgacgccctgcgttggagccactcctgtcccgccttcctcctccacagtgctgcttctcttgggaactccactctcc

SEQ ID NO: 3786 - DNA, 201 bp, Homo sapiens
ccctggcggctgagaccagcctgctgaaggaggagctgctgcgggtgaaccgccagggcatcctcaccatcaactcacagcccaacatcaacgggaagccrtcctccgaccccatcgtgggctggggccccagcgggggctatgtcttccagaaggcctacttagagtttttcacttcccgcgagacagcggaagcacttc

SEQ ID NO: 3787 - DNA, 201 bp, Homo sapiens
tgctgccatccgcaactatggcatcgagctggccgtgagcctgtgccaggagcttctggccagtggcttggtgccaggcctccacttctacaccctcaacygcgagatggctaccacagaggtgctgaagcgcctggggatgtggactgaggaccccaggcgtcccctaccctgggctctcagcgcccaccccaagcgccg

SEQ ID NO: 3788 - DNA, 201 bp, Homo sapiens
ggtggcacctcctgagaaggcgaggagagtggttgttgccaactaagccctcgaaccaaggcagcctccagagccagcctgggactcccagtgaacttacmcttggagcccgtgcagtacaggcaaaacacgcaagggcatcaggcactggtggcatcgtagaagagatgtggcaaagtgctgtacccttccacctcctag

SEQ ID NO: 3789 - DNA, 201 bp, Homo sapiens
caaccgcgagatggctaccacagaggtgctgaagcgcctggggatgtggactgaggaccccaggcgtcccctaccctgggctctcagcgcccaccccaagygccgagaggaagatgtacgtcccatcttctgggcctccagaccaaagagttacatctaccgtacccaggagtgggacgagttccctaacggccgctgggg

SEQ ID NO: 3790 - DNA, 201 bp, Homo sapiens
agacctcctccatgatgatcgccagcaccgccgtgaactactgtggcctggagaccatcctgcacatgacctgctgccgtcagcgcctggaggagatcacrggccatctgcacaaagctaagcagctgggcctgaagaacatcatggcgctgcggggagacccaataggtgaccagtgggaagaggaggagggaggcttca

SEQ ID NO: 3791 - DNA, 201 bp, Homo sapiens
ggatggcagcaggtggccccctctacatagacgtgacctggcacccagcaggtgaccctggctcagacaaggagacctcctccatgatgatcgccagcacmgccgtgaactactgtggcctggagaccatcctgcacatgacctgctgccgtcagcgcctggaggagatcacgggccatctgcacaaagctaagcagctgg

SEQ ID NO: 3792 - DNA, 201 bp, Homo sapiens
ccgggcctggaccccgagcggcatgagagactccgggagaagatgaggcggcgattggaatctggtgacaagtggttctccctggaattcttccctcctcraactgctgagggagctgtcaatctcatctcaaggtttgaccggatggcagcaggtggccccctctacatagacgtgacctggcacccagcaggtgaccct

SEQ ID NO: 3793 - DNA, 201 bp, Homo sapiens
cctgaagaacatcatggcgctgcggggagacccaataggtgaccagtgggaagaggaggagggaggcttcaactacgcagtggacctggtgaagcacatcygaagtgagtttggtgactactttgacatctgtgtggcaggttaccccaaaggccaccccgaagcagggagctttgaggctgacctgaagcacttgaagga

SEQ ID NO: 3794 - DNA, 201 bp, Homo sapiens
ccactcaggtgtcttgatgtgtcgggggtgtggctgcctgccccctgatgctccctgccccaccctgtgcagtaggaacccagccatggtgaacgaagccwgaggaaacagcagcctcaacccctgcttggagggcagtgccagcagtggcagtgagagctccaaagatagttcgagatgttccaccccgggcctggaccc

SEQ ID NO: 3795 - DNA, 201 bp, Homo sapiens; identical to SEQ ID NO: 3762

SEQ ID NO: 3796 - DNA, 201 bp, Homo sapiens; identical to SEQ ID NO: 3763

SEQ ID NO: 3797 - DNA, 201 bp, Homo sapiens; identical to SEQ ID NO: 3764

SEQ ID NO: 3798 - DNA, 201 bp, Homo sapiens; identical to SEQ ID NO: 3765

SEQ ID NO: 3799 - DNA, 201 bp, Homo sapiens; identical to SEQ ID NO: 3766

SEQ ID NO: 3800 - DNA, 201 bp, Homo sapiens; identical to SEQ ID NO: 3767

SEQ ID NO: 3801 - DNA, 201 bp, Homo sapiens; identical to SEQ ID NO: 3769

SEQ ID NO: 3802 - DNA, 201 bp, Homo sapiens; identical to SEQ ID NO: 3768

SEQ ID NO: 3803 - DNA, 201 bp, Homo sapiens
ggcctgatgctgccccgttccctgtcagaggctaagatgagatttgccactgggatttcttcgctgctctagctggcaggacacatcccggcctcttcttccacccattcccccatgtggctgaagacattccaacaatggggtgggcccataatagttagccctcagtcagttcccggagcacagccctgggagggggct

SEQ ID NO: 3804 - DNA, 201 bp, Homo sapiens
aggcctgatgctgccccgttccctgtcagaggctaagatgagatttgccactgggatttcttcgctgctctagctggcaggacacatcccggcctcttcttccacccattcccccatgtggctgaagacattccaacaatggggtgggcccataatagttagccctcagtcagttcccggagcacagccctgggagggggc

SEQ ID NO: 3805 - DNA, 201 bp, Homo sapiens
gaggcctgatgctgccccgttccctgtcagaggctaagatgagatttgccactgggatttcttcgctgctctagctggcaggacacatcccggcctcttcttccacccattcccccatgtggctgaagacattccaacaatggggtgggcccataatagttagccctcagtcagttcccggagcacagccctgggaggggg

SEQ ID NO: 3806 - DNA, 201 bp, Homo sapiens; identical to SEQ ID NO: 3770

SEQ ID NO: 3807 - DNA, 201 bp, Homo sapiens; identical to SEQ ID NO: 3771

SEQ ID NO: 3808 - DNA, 201 bp, Homo sapiens; identical to SEQ ID NO: 3773

SEQ ID NO: 3809 - DNA, 201 bp, Homo sapiens; identical to SEQ ID NO: 3772

SEQ ID NO: 3810 - DNA, 201 bp, Homo sapiens; identical to SEQ ID NO: 3774

SEQ ID NO: 3811 - DNA, 201 bp, Homo sapiens; identical to SEQ ID NO: 3775

SEQ ID NO: 3812 - DNA, 201 bp, Homo sapiens; identical to SEQ ID NO: 3776

SEQ ID NO: 3813 - DNA, 201 bp, Homo sapiens; identical to SEQ ID NO: 3777

SEQ ID NO: 3814 - DNA, 201 bp, Homo sapiens; identical to SEQ ID NO: 3778

SEQ ID NO: 3815 - DNA, 201 bp, Homo sapiens; identical to SEQ ID NO: 3779

SEQ ID NO: 3816 - DNA, 201 bp, Homo sapiens; identical to SEQ ID NO: 3780

SEQ ID NO: 3817 - DNA, 201 bp, Homo sapiens; identical to SEQ ID NO: 3781

SEQ ID NO: 3818 - DNA, 187 bp, Homo sapiens
aaggctagttcctttcaattccatttaaaaaacaaaaaccagcaggtgtggtggctcatggcgtaatgggcctgcccaatgctttgggaggccaaggcagrtagatcgcttgagcccaggagtttgagacaagccctggcaacatagtgagatcccatttctacaaaaaaaaaaaaaaaattagccg

SEQ ID NO: 3819 - DNA, 201 bp, Homo sapiens; identical to SEQ ID NO: 3782

SEQ ID NO: 3820 - DNA, 201 bp, Homo sapiens; identical to SEQ ID NO: 3783

SEQ ID NO: 3821 - DNA, 201 bp, Homo sapiens; identical to SEQ ID NO: 3784

SEQ ID NO: 3822 - DNA, 112 bp, Homo sapiens
ccaatgctttgggaggccaaggcaggtagatcgcttgagcccaggagtttgagacaagccctggcaacatagtgagatcccatttctacaaaaaaaaaaaaaaaattagccg

SEQ ID NO: 3823 - DNA, 201 bp, Homo sapiens; identical to SEQ ID NO: 3786

SEQ ID NO: 3824 - DNA, 201 bp, Homo sapiens; identical to SEQ ID NO: 3785

SEQ ID NO: 3825 - DNA, 201 bp, Homo sapiens; identical to SEQ ID NO: 3787

SEQ ID NO: 3826 - DNA, 113 bp, Homo sapiens
cccaatgctttgggaggccaaggcaggtagatcgcttgagcccaggagtttgagacaagccctggcaacatagtgagatcccatttctacaaaaaaaaaaaaaaaattagccg

SEQ ID NO: 3827 - DNA, 201 bp, Homo sapiens; identical to SEQ ID NO: 3789

SEQ ID NO: 3828 - DNA, 201 bp, Homo sapiens; identical to SEQ ID NO: 3788

SEQ ID NO: 3829 - DNA, 179 bp, Homo sapiens
gccacagtggtgcggccggcggccgagcgttctgagtcacccgggactggagggccttcttcctgtgtggaaatacagygcctccggcttgaacctgccactcaggtgtcttgatgtgtcgggggtgtggctgcctgccccctgatgctccctgccccaccctgtgcagtaggaaccca

SEQ ID NO: 3830 - DNA, 201 bp, Homo sapiens; identical to SEQ ID NO: 3790

SEQ ID NO: 3831 - DNA, 201 bp, Homo sapiens; identical to SEQ ID NO: 3791

SEQ ID NO: 3832 - DNA, 201 bp, Homo sapiens; identical to SEQ ID NO: 3792

SEQ ID NO: 3833 - DNA, 201 bp, Homo sapiens; identical to SEQ ID NO: 3793

SEQ ID NO: 3834 - DNA, 201 bp, Homo sapiens; identical to SEQ ID NO: 3794

SEQ ID NO: 3835 - DNA, 201 bp, Homo sapiens; identical to SEQ ID NO: 3762

SEQ ID NO: 3836 - DNA, 201 bp, Homo sapiens; identical to SEQ ID NO: 3763

SEQ ID NO: 3837 - DNA, 201 bp, Homo sapiens; identical to SEQ ID NO: 3764

SEQ ID NO: 3838 - DNA, 201 bp, Homo sapiens; identical to SEQ ID NO: 3765

SEQ ID NO: 3839 - DNA, 201 bp, Homo sapiens; identical to SEQ ID NO: 3766

SEQ ID NO: 3840 - DNA, 201 bp, Homo sapiens; identical to SEQ ID NO: 3767

SEQ ID NO: 3841 - DNA, 201 bp, Homo sapiens; identical to SEQ ID NO: 3768

SEQ ID NO: 3842 - DNA, 201 bp, Homo sapiens; identical to SEQ ID NO: 3769

SEQ ID NO: 3843 - DNA, 201 bp, Homo sapiens; identical to SEQ ID NO: 3770

SEQ ID NO: 3844 - DNA, 201 bp, Homo sapiens; identical to SEQ ID NO: 3771

SEQ ID NO: 3845 - DNA, 201 bp, Homo sapiens; identical to SEQ ID NO: 3772

SEQ ID NO: 3846 - DNA, 201 bp, Homo sapiens; identical to SEQ ID NO: 3773

SEQ ID NO: 3847 - DNA, 201 bp, Homo sapiens; identical to SEQ ID NO: 3774

SEQ ID NO: 3848 - DNA, 201 bp, Homo sapiens; identical to SEQ ID NO: 3775

SEQ ID NO: 3849 - DNA, 201 bp, Homo sapiens; identical to SEQ ID NO: 3776

SEQ ID NO: 3850 - DNA, 201 bp, Homo sapiens; identical to SEQ ID NO: 3777

SEQ ID NO: 3851 - DNA, 201 bp, Homo sapiens; identical to SEQ ID NO: 3778

SEQ ID NO: 3852 - DNA, 201 bp, Homo sapiens; identical to SEQ ID NO: 3779

SEQ ID NO: 3853 - DNA, 201 bp, Homo sapiens; identical to SEQ ID NO: 3780

SEQ ID NO: 3854 - DNA, 201 bp, Homo sapiens; identical to SEQ ID NO: 3781

SEQ ID NO: 3855 - DNA, 201 bp, Homo sapiens; identical to SEQ ID NO: 3782

SEQ ID NO: 3856 - DNA, 201 bp, Homo sapiens; identical to SEQ ID NO: 3783

SEQ ID NO: 3857 - DNA, 201 bp, Homo sapiens; identical to SEQ ID NO: 3784

SEQ ID NO: 3858 - DNA, 201 bp, Homo sapiens; identical to SEQ ID NO: 3785

SEQ ID NO: 3859 - DNA, 201 bp, Homo sapiens; identical to SEQ ID NO: 3786

SEQ ID NO: 3860 - DNA, 201 bp, Homo sapiens; identical to SEQ ID NO: 3787

SEQ ID NO: 3861 - DNA, 201 bp, Homo sapiens; identical to SEQ ID NO: 3788

SEQ ID NO: 3862 - DNA, 201 bp, Homo sapiens; identical to SEQ ID NO: 3789

SEQ ID NO: 3863 - DNA, 179 bp, Homo sapiens; identical to SEQ ID NO: 3829

SEQ ID NO: 3864 - DNA, 201 bp, Homo sapiens; identical to SEQ ID NO: 3790

SEQ ID NO: 3865 - DNA, 201 bp, Homo sapiens; identical to SEQ ID NO: 3791

SEQ ID NO: 3866 - DNA, 201 bp, Homo sapiens; identical to SEQ ID NO: 3792

SEQ ID NO: 3867 - DNA, 201 bp, Homo sapiens; identical to SEQ ID NO: 3793

SEQ ID NO: 3868 - DNA, 126 bp, Homo sapiens
gaacccagccatggtgaacgaagccwgaggaaacagcagcctcaacccctgcttggagggcagtgccagcagtggcagtgagagctccaaagatagttcgagatgttccaccccgggcctggaccc

SEQ ID NO: 3869 - DNA, 201 bp, Homo sapiens; identical to SEQ ID NO: 3762

SEQ ID NO: 3870 - DNA, 201 bp, Homo sapiens; identical to SEQ ID NO: 3763

SEQ ID NO: 3871 - DNA, 201 bp, Homo sapiens; identical to SEQ ID NO: 3764

SEQ ID NO: 3872 - DNA, 201 bp, Homo sapiens; identical to SEQ ID NO: 3765

SEQ ID NO: 3873 - DNA, 201 bp, Homo sapiens; identical to SEQ ID NO: 3766

SEQ ID NO: 3874 - DNA, 201 bp, Homo sapiens; identical to SEQ ID NO: 3767

SEQ ID NO: 3875 - DNA, 201 bp, Homo sapiens; identical to SEQ ID NO: 3768

SEQ ID NO: 3876 - DNA, 201 bp, Homo sapiens; identical to SEQ ID NO: 3769

SEQ ID NO: 3877 - DNA, 201 bp, Homo sapiens; identical to SEQ ID NO: 3770

SEQ ID NO: 3878 - DNA, 201 bp, Homo sapiens; identical to SEQ ID NO: 3771

SEQ ID NO: 3879 - DNA, 201 bp, Homo sapiens; identical to SEQ ID NO: 3772

SEQ ID NO: 3880 - DNA, 201 bp, Homo sapiens; identical to SEQ ID NO: 3773

SEQ ID NO: 3881 - DNA, 201 bp, Homo sapiens; identical to SEQ ID NO: 3774

SEQ ID NO: 3882 - DNA, 201 bp, Homo sapiens; identical to SEQ ID NO: 3775

SEQ ID NO: 3883 - DNA, 201 bp, Homo sapiens; identical to SEQ ID NO: 3776

SEQ ID NO: 3884 - DNA, 201 bp, Homo sapiens; identical to SEQ ID NO: 3777

SEQ ID NO: 3885 - DNA, 201 bp, Homo sapiens; identical to SEQ ID NO: 3778

SEQ ID NO: 3886 - DNA, 201 bp, Homo sapiens; identical to SEQ ID NO: 3779

SEQ ID NO: 3887 - DNA, 201 bp, Homo sapiens; identical to SEQ ID NO: 3780

SEQ ID NO: 3888 - DNA, 201 bp, Homo sapiens; identical to SEQ ID NO: 3781

SEQ ID NO: 3889 - DNA, 201 bp, Homo sapiens; identical to SEQ ID NO: 3782

SEQ ID NO: 3890 - DNA, 201 bp, Homo sapiens; identical to SEQ ID NO: 3783

SEQ ID NO: 3891 - DNA, 201 bp, Homo sapiens; identical to SEQ ID NO: 3784

SEQ ID NO: 3892 - DNA, 201 bp, Homo sapiens; identical to SEQ ID NO: 3785

SEQ ID NO: 3893 - DNA, 201 bp, Homo sapiens; identical to SEQ ID NO: 3786

SEQ ID NO: 3894 - DNA, 201 bp, Homo sapiens; identical to SEQ ID NO: 3787

SEQ ID NO: 3895 - DNA, 201 bp, Homo sapiens; identical to SEQ ID NO: 3788

SEQ ID NO: 3896 - DNA, 201 bp, Homo sapiens; identical to SEQ ID NO: 3789

SEQ ID NO: 3897 - DNA, 201 bp, Homo sapiens; identical to SEQ ID NO: 3790

SEQ ID NO: 3898 - DNA, 201 bp, Homo sapiens; identical to SEQ ID NO: 3791

SEQ ID NO: 3899 - DNA, 201 bp, Homo sapiens; identical to SEQ ID NO: 3792

SEQ ID NO: 3900 - DNA, 201 bp, Homo sapiens; identical to SEQ ID NO: 3793

SEQ ID NO: 3901 - DNA, 201 bp, Homo sapiens; identical to SEQ ID NO: 3761

SEQ ID NO: 3902 - DNA, 201 bp, Homo sapiens; identical to SEQ ID NO: 3762

SEQ ID NO: 3903 - DNA, 201 bp, Homo sapiens; identical to SEQ ID NO: 3763

SEQ ID NO: 3904 - DNA, 201 bp, Homo sapiens; identical to SEQ ID NO: 3764

SEQ ID NO: 3905 - DNA, 201 bp, Homo sapiens; identical to SEQ ID NO: 3765

SEQ ID NO: 3906 - DNA, 201 bp, Homo sapiens; identical to SEQ ID NO: 3766

SEQ ID NO: 3907 - DNA, 201 bp, Homo sapiens; identical to SEQ ID NO: 3767

SEQ ID NO: 3908 - DNA, 201 bp, Homo sapiens; identical to SEQ ID NO: 3769

SEQ ID NO: 3909 - DNA, 201 bp, Homo sapiens; identical to SEQ ID NO: 3768

SEQ ID NO: 3910 - DNA, 201 bp, Homo sapiens; identical to SEQ ID NO: 3803

SEQ ID NO: 3911 - DNA, 201 bp, Homo sapiens; identical to SEQ ID NO: 3804

SEQ ID NO: 3912 - DNA, 201 bp, Homo sapiens; identical to SEQ ID NO: 3805

SEQ ID NO: 3913 - DNA, 201 bp, Homo sapiens; identical to SEQ ID NO: 3770

SEQ ID NO: 3914 - DNA, 201 bp, Homo sapiens; identical to SEQ ID NO: 3771

SEQ ID NO: 3915 - DNA, 201 bp, Homo sapiens; identical to SEQ ID NO: 3773

SEQ ID NO: 3916 - DNA, 201 bp, Homo sapiens; identical to SEQ ID NO: 3772

SEQ ID NO: 3917 - DNA, 201 bp, Homo sapiens; identical to SEQ ID NO: 3774

SEQ ID NO: 3918 - DNA, 201 bp, Homo sapiens; identical to SEQ ID NO: 3775

SEQ ID NO: 3919 - DNA, 201 bp, Homo sapiens; identical to SEQ ID NO: 3776

SEQ ID NO: 3920 - DNA, 201 bp, Homo sapiens; identical to SEQ ID NO: 3777

SEQ ID NO: 3921 - DNA, 201 bp, Homo sapiens; identical to SEQ ID NO: 3778

SEQ ID NO: 3922 - DNA, 201 bp, Homo sapiens; identical to SEQ ID NO: 3779

SEQ ID NO: 3923 - DNA, 201 bp, Homo sapiens; identical to SEQ ID NO: 3780

SEQ ID NO: 3924 - DNA, 201 bp, Homo sapiens; identical to SEQ ID NO: 3781

SEQ ID NO: 3925 - DNA, 187 bp, Homo sapiens; identical to SEQ ID NO: 3818

SEQ ID NO: 3926 - DNA, 201 bp, Homo sapiens; identical to SEQ ID NO: 3782

SEQ ID NO: 3927 - DNA, 201 bp, Homo sapiens; identical to SEQ ID NO: 3783

SEQ ID NO: 3928 - DNA, 201 bp, Homo sapiens; identical to SEQ ID NO: 3784

SEQ ID NO: 3929 - DNA, 112 bp, Homo sapiens; identical to SEQ ID NO: 3822

SEQ ID NO: 3930 - DNA, 201 bp, Homo sapiens; identical to SEQ ID NO: 3786

SEQ ID NO: 3931 - DNA, 201 bp, Homo sapiens; identical to SEQ ID NO: 3785

SEQ ID NO: 3932 - DNA, 201 bp, Homo sapiens; identical to SEQ ID NO: 3787

SEQ ID NO: 3933 - DNA, 113 bp, Homo sapiens; identical to SEQ ID NO: 3826

SEQ ID NO: 3934 - DNA, 201 bp, Homo sapiens; identical to SEQ ID NO: 3789

SEQ ID NO: 3935 - DNA, 201 bp, Homo sapiens; identical to SEQ ID NO: 3788

SEQ ID NO: 3936 - DNA, 201 bp, Homo sapiens; identical to SEQ ID NO: 3790

SEQ ID NO: 3937 - DNA, 201 bp, Homo sapiens; identical to SEQ ID NO: 3791

SEQ ID NO: 3938 - DNA, 201 bp, Homo sapiens; identical to SEQ ID NO: 3792

SEQ ID NO: 3939 - DNA, 201 bp, Homo sapiens; identical to SEQ ID NO: 3793

SEQ ID NO: 3940 - DNA, 201 bp, Homo sapiens
tgcgttccccgcccctgcagcggccacagtggtgcggccggcggccgagcgttctgagtcacccgggactggagggaacccagccatggtgaacgaagccwgaggaaacagcagcctcaacccctgcttggagggcagtgccagcagtggcagtgagagctccaaagatagttcgagatgttccaccccgggcctggaccc

SEQ ID NO: 3941 - DNA, 201 bp, Homo sapiens; identical to SEQ ID NO: 3762

SEQ ID NO: 3942 - DNA, 201 bp, Homo sapiens; identical to SEQ ID NO: 3763

SEQ ID NO: 3943 - DNA, 201 bp, Homo sapiens; identical to SEQ ID NO: 3764

SEQ ID NO: 3944 - DNA, 201 bp, Homo sapiens; identical to SEQ ID NO: 3765

SEQ ID NO: 3945 - DNA, 201 bp, Homo sapiens; identical to SEQ ID NO: 3766

SEQ ID NO: 3946 - DNA, 201 bp, Homo sapiens; identical to SEQ ID NO: 3767

SEQ ID NO: 3947 - DNA, 201 bp, Homo sapiens; identical to SEQ ID NO: 3768

SEQ ID NO: 3948 - DNA, 201 bp, Homo sapiens; identical to SEQ ID NO: 3769

SEQ ID NO: 3949 - DNA, 201 bp, Homo sapiens; identical to SEQ ID NO: 3770

SEQ ID NO: 3950 - DNA, 201 bp, Homo sapiens; identical to SEQ ID NO: 3771

SEQ ID NO: 3951 - DNA, 201 bp, Homo sapiens; identical to SEQ ID NO: 3772

SEQ ID NO: 3952 - DNA, 201 bp, Homo sapiens; identical to SEQ ID NO: 3773

SEQ ID NO: 3953 - DNA, 201 bp, Homo sapiens; identical to SEQ ID NO: 3774

SEQ ID NO: 3954 - DNA, 201 bp, Homo sapiens; identical to SEQ ID NO: 3775

SEQ ID NO: 3955 - DNA, 201 bp, Homo sapiens; identical to SEQ ID NO: 3776

SEQ ID NO: 3956 - DNA, 201 bp, Homo sapiens; identical to SEQ ID NO: 3777

SEQ ID NO: 3957 - DNA, 201 bp, Homo sapiens; identical to SEQ ID NO: 3778

SEQ ID NO: 3958 - DNA, 201 bp, Homo sapiens; identical to SEQ ID NO: 3779

SEQ ID NO: 3959 - DNA, 201 bp, Homo sapiens; identical to SEQ ID NO: 3780

SEQ ID NO: 3960 - DNA, 201 bp, Homo sapiens; identical to SEQ ID NO: 3781

SEQ ID NO: 3961 - DNA, 201 bp, Homo sapiens; identical to SEQ ID NO: 3782

SEQ ID NO: 3962 - DNA, 201 bp, Homo sapiens; identical to SEQ ID NO: 3783

SEQ ID NO: 3963 - DNA, 201 bp, Homo sapiens; identical to SEQ ID NO: 3784

SEQ ID NO: 3964 - DNA, 201 bp, Homo sapiens; identical to SEQ ID NO: 3785

SEQ ID NO: 3965 - DNA, 201 bp, Homo sapiens; identical to SEQ ID NO: 3786

SEQ ID NO: 3966 - DNA, 201 bp, Homo sapiens; identical to SEQ ID NO: 3787

SEQ ID NO: 3967 - DNA, 201 bp, Homo sapiens; identical to SEQ ID NO: 3788

SEQ ID NO: 3968 - DNA, 201 bp, Homo sapiens; identical to SEQ ID NO: 3789

SEQ ID NO: 3969 - DNA, 201 bp, Homo sapiens; identical to SEQ ID NO: 3790

SEQ ID NO: 3970 - DNA, 201 bp, Homo sapiens; identical to SEQ ID NO: 3791

SEQ ID NO: 3971 - DNA, 201 bp, Homo sapiens; identical to SEQ ID NO: 3792

SEQ ID NO: 3972 - DNA, 201 bp, Homo sapiens; identical to SEQ ID NO: 3793

SEQ ID NO: 3973 - DNA, 201 bp, Homo sapiens
aactcgcttggatctatccaaaaatcagattcgtagcctttaccttcatccttcatttgggaagttgaattccttaaagtccatagatttttcctccaacmaaatattccttgtatgtgaacatgagctcgagcccctacaagggaaaacgctctccttttttagcctcgcagctaatagcttgtatagcagagtctcagt

SEQ ID NO: 3974 - DNA, 201 bp, Homo sapiens
gtggcaataaactagtgactttgccaaagatcaaccttacagcgaacctcatccacttatcagaaaacaggctagaaaatctagatattctctactttctyctacgggtacctcatctccagattctcattttaaatcaaaatcgcttctcctcctgtagtggagatcaaaccccttcagagaatcccagcttagaacagc

SEQ ID NO: 3975 - DNA, 201 bp, Homo sapiens
cagctcctagctcctaatcctgatgtatttgtatcacttagtgtcttggatataactcataacaagttcatttgtgaatgtgaacttagcacttttatcarttggcttaatcacaccaatgtcactatagctgggcctcctgcagacatatattgtgtgtaccctgactcgttctctggggtttccctcttctctctttcc

SEQ ID NO: 3976 - DNA, 201 bp, Homo sapiens
actacctaaggtagcctacattgatttgcaaaagaatcacattgcaataattcaagaccaaacattcaaattcctggaaaaattacagaccttggatctcygagacaatgctcttacaaccattcattttattccaagcatacccgatatcttcttgagtggcaataaactagtgactttgccaaagatcaaccttacagc

SEQ ID NO: 3977 - DNA, 201 bp, Homo sapiens
gccgaatagccttttatcgtttctgcaacctcacccaggtcccccaggtcctcaacaccactgagaggctcctgctgagcttcaactatatcaggacagtyactgcttcatccttcccctttctggaacagctgcagctgctggagctcgggagccagtatacccccttgactattgacaaggaggccttcagaaacctgc

SEQ ID NO: 3978 - DNA, 201 bp, Homo sapiens
gaatcttggacctgggaagtagtaagatatacttcttgcatccagatgcttttcagggactgttccatctgtttgaacttagactgtatttctgtggtctytctgatgctgtattgaaagatggttatttcagaaatttaaaggctttaactcgcttggatctatccaaaaatcagattcgtagcctttaccttcatcctt

SEQ ID NO: 3979 - DNA, 201 bp, Homo sapiens
gctttgtacagaaacagcagtatttgaggtggcctgaggatctccaggatgttggctggtttcttcataaactctctcaacagatactaaagaaagaaaargaaaagaagaaagacaataacattccgttgcaaactgtagcaaccatctcctaatcaaaggagcaatttccaacttatctcaagccacaaataactcttc

SEQ ID NO: 3980 - DNA, 201 bp, Homo sapiens
gagccagtatacccccttgactattgacaaggaggccttcagaaacctgcccaaccttagaatcttggacctgggaagtagtaagatatacttcttgcatscagatgcttttcagggactgttccatctgtttgaacttagactgtatttctgtggtctctctgatgctgtattgaaagatggttatttcagaaatttaaa

SEQ ID NO: 3981 - DNA, 201 bp, Homo sapiens
ttgtgaatgtgaacttagcacttttatcaattggcttaatcacaccaatgtcactatagctgggcctcctgcagacatatattgtgtgtaccctgactcgytctctggggtttccctcttctctctttccacggaaggttgtgatgaagaggaagtcttaaagtccctaaagttctcccttttcattgtatgcactgtcac

SEQ ID NO: 3982 - DNA, 201 bp, Homo sapiens
gaagttgaattccttaaagtccatagatttttcctccaaccaaatattccttgtatgtgaacatgagctcgagcccctacaagggaaaacgctctcctttyttagcctcgcagctaatagcttgtatagcagagtctcagtggactggggaaaatgtatgaacccattcagaaacatggtgctggagatactagatgtttc

SEQ ID NO: 3983 - DNA, 201 bp, Homo sapiens
gagaggctcctgctgagcttcaactatatcaggacagtcactgcttcatccttcccctttctggaacagctgcagctgctggagctcgggagccagtatayccccttgactattgacaaggaggccttcagaaacctgcccaaccttagaatcttggacctgggaagtagtaagatatacttcttgcatccagatgctttt

SEQ ID NO: 3984 - DNA, 201 bp, Homo sapiens; identical to SEQ ID NO: 3981

SEQ ID NO: 3985 - DNA, 201 bp, Homo sapiens
ttgagaatgttggcgctgtccgaacctggagacaggaaaacaaaaagtcctttctcctgattcaccaaaaaataaaatactgactaccatcactgtgatgwgattcctatagtctcaggaactgaagtctttaaacaaccagggaccctctgcccctagaataagaacatactagaagtcccttctgctaggacaacgagg

SEQ ID NO: 3986 - DNA, 112 bp, Homo sapiens
ggttttcaggakcccgagcgagggcgccgcttttgcgtccgggaggagccaaccgtggcgcaggcggcgcggggaggcgtcccagagtctcactctgccgcccaggctggac

SEQ ID NO: 3987 - DNA, 201 bp, Homo sapiens; identical to SEQ ID NO: 3982

SEQ ID NO: 3988 - DNA, 201 bp, Homo sapiens; identical to SEQ ID NO: 3973

SEQ ID NO: 3989 - DNA, 201 bp, Homo sapiens; identical to SEQ ID NO: 3983

SEQ ID NO: 3990 - DNA, 201 bp, Homo sapiens; identical to SEQ ID NO: 3974

SEQ ID NO: 3991 - DNA, 201 bp, Homo sapiens; identical to SEQ ID NO: 3975

SEQ ID NO: 3992 - DNA, 201 bp, Homo sapiens; identical to SEQ ID NO: 3976

SEQ ID NO: 3993 - DNA, 201 bp, Homo sapiens; identical to SEQ ID NO: 3977

SEQ ID NO: 3994 - DNA, 201 bp, Homo sapiens; identical to SEQ ID NO: 3978

SEQ ID NO: 3995 - DNA, 201 bp, Homo sapiens; identical to SEQ ID NO: 3979

SEQ ID NO: 3996 - DNA, 201 bp, Homo sapiens; identical to SEQ ID NO: 3980

SEQ ID NO: 3997 - DNA, 201 bp, Homo sapiens
  misc_feature (1)...(201): n = A,T,C or G, or insertion/deletion polymorphism (see Tables 1-2)
ggccgaagtctttcccggagcagctgccttgatggttactttgacaagtagtgactgaaaagagcagagatcattaaaaattaaacttacaaagctgctanagtgggaagaaggagaacttgaagccacaatttttgcacttgcttagaagccatctaatctcagttccaccaggtgagaagagtgatgaccatccttttc

SEQ ID NO: 3998 - DNA, 201 bp, Homo sapiens
agccatctaatctcagttccaccaggtgagaagagtgatgaccatccttttccttactatggttatttcatactttggttgcatgaaggctgcccccatgbaagaagcaaacatccgaggacaaggtggcttggcctacccaggtgtgcggacccatgggactctggagagcgtgaatgggcccaaggcaggttcaagagg

SEQ ID NO: 3999 - DNA, 201 bp, Homo sapiens
ctaatctcagttccaccaggtgagaagagtgatgaccatccttttccttactatggttatttcatactttggttgcatgaaggctgcccccatgaaagaabcaaacatccgaggacaaggtggcttggcctacccaggtgtgcggacccatgggactctggagagcgtgaatgggcccaaggcaggttcaagaggcttgac

SEQ ID NO: 4000 - DNA, 201 bp, Homo sapiens
gaaaaaataatagagtgtgggagttttggggccgaagtctttcccggagcagctgccttgatggttactttgacaagtagtgactgaaaagagcagagatrattaaaaattaaacttacaaagctgctaaagtgggaagaaggagaacttgaagccacaatttttgcacttgcttagaagccatctaatctcagttccacc

SEQ ID NO: 4001 - DNA, 201 bp, Homo sapiens
aactacccagtcgtacgtgcgggcccttaccatggatagcaaaaagagaattggctggcgattcataaggatagacacttcttgtgtatgtacattgaccmttaaaaggggaagatagtggatttatgttgtatagattagattatattgagacaaaaattatctatttgtatatatacataacagggtaaattattcagt

SEQ ID NO: 4002 - DNA, 201 bp, Homo sapiens
ggttgcatgaaggctgcccccatgaaagaagcaaacatccgaggacaaggtggcttggcctacccaggtgtgcggacccatgggactctggagagcgtgartgggcccaaggcaggttcaagaggcttgacatcattggctgacactttcgaacacgtgatagaagagctgttggatgaggaccagaaagttcggcccaat

SEQ ID NO: 4003 - DNA, 201 bp, Homo sapiens
tcataaggatagacacttcttgtgtatgtacattgaccattaaaaggggaagatagtggatttatgttgtatagattagattatattgagacaaaaattamctatttgtatatatacataacagggtaaattattcagttaagaaaaaaataattttatgaactgcatgtataaatgaagtttatacagtacagtggttct

SEQ ID NO: 4004 - DNA, 201 bp, Homo sapiens
  misc_feature (1)...(201): n = A,T,C or G, or insertion/deletion polymorphism (see Tables 1-2)
ctctggagagcgtgaatgggcccaaggcaggttcaagaggcttgacatcattggctgacactttcgaacacgtgatagaagagctgttggatgaggaccanaaagttcggcccaatgaagaaaacaataaggacgcagacttgtacacgtccagggtgatgctcagtagtcaagtgcctttggagcctcctcttctctttc

SEQ ID NO: 4005 - DNA, 201 bp, Homo sapiens
tccagggtgatgctcagtagtcaagtgcctttggagcctcctcttctctttctgctggaggaatacaaaaattacctagatgctgcaaacatgtccatgabggtccggcgccactctgaccctgcccgccgaggggagctgagcgtgtgtgacagtattagtgagtgggtaacggcggcagacaaaaagactgcagtggac

SEQ ID NO: 4006 - DNA, 201 bp, Homo sapiens
gtgatgctcagtagtcaagtgcctttggagcctcctcttctctttctgctggaggaatacaaaaattacctagatgctgcaaacatgtccatgagggtccbgcgccactctgaccctgcccgccgaggggagctgagcgtgtgtgacagtattagtgagtgggtaacggcggcagacaaaaagactgcagtggacatgtcg

SEQ ID NO: 4007 - DNA, 201 bp, Homo sapiens
ggcctacccaggtgtgcggacccatgggactctggagagcgtgaatgggcccaaggcaggttcaagaggcttgacatcattggctgacactttcgaacacrtgatagaagagctgttggatgaggaccagaaagttcggcccaatgaagaaaacaataaggacgcagacttgtacacgtccagggtgatgctcagtagtca

SEQ ID NO: 4008 - DNA, 201 bp, Homo sapiens
ttgcgcacaacttaaaaagtctgcattacattccttgataatgttgtggtttgttgccgttgccaagaactgaaaacataaaaagttaaaaaaaataatamattgcatgctgctttaattgtgaattgataataaactgtcctctttcagaaaacagaaaaaaacacacacacacacaacaaaaatttgaaccaaaacatt

SEQ ID NO: 4009 - DNA, 201 bp, Homo sapiens
tagatgctgcaaacatgtccatgagggtccggcgccactctgaccctgcccgccgaggggagctgagcgtgtgtgacagtattagtgagtgggtaacggcrgcagacaaaaagactgcagtggacatgtcgggcgggacggtcacagtccttgaaaaggtccctgtatcaaaaggccaactgaagcaatacttctacgaga

SEQ ID NO: 4010 - DNA, 201 bp, Homo sapiens
ccaagaactgaaaacataaaaagttaaaaaaaataataaattgcatgctgctttaattgtgaattgataataaactgtcctctttcagaaaacagaaaaamacacacacacacacaacaaaaatttgaaccaaaacattccgtttacattttagacagtaagtatcttcgttcttgttagtactatatctgttttactgct

SEQ ID NO: 4011 - DNA, 201 bp, Homo sapiens; identical to SEQ ID NO: 4004
  misc_feature (1)...(201): n = A,T,C or G, or insertion/deletion polymorphism (see Tables 1-2)

SEQ ID NO: 4012 - DNA, 201 bp, Homo sapiens; identical to SEQ ID NO: 4005

SEQ ID NO: 4013 - DNA, 201 bp, Homo sapiens; identical to SEQ ID NO: 4006

SEQ ID NO: 4014 - DNA, 201 bp, Homo sapiens; identical to SEQ ID NO: 4007

SEQ ID NO: 4015 - DNA, 201 bp, Homo sapiens; identical to SEQ ID NO: 4008

SEQ ID NO: 4016 - DNA, 201 bp, Homo sapiens; identical to SEQ ID NO: 4009

SEQ ID NO: 4017 - DNA, 201 bp, Homo sapiens; identical to SEQ ID NO: 4010

SEQ ID NO: 4018 - DNA, 201 bp, Homo sapiens
ggccctgctcgagtcagggctgagcaaagaggcactgatccaggcactgggtgagccggggccctacctcctggctggagaaggccccctggacaaggggragtcctgcggcggcggtcgaggggagctggctgagctgcccaatgggctgggggagactcggggctccgaggacgagacggacgacgatggggaagactt

SEQ ID NO: 4019 - DNA, 201 bp, Homo sapiens
gcggaatgcatccagagaggggtgtccccatcacaggcacaggggctgggctccaacctcgtcacggaggtgcgtgtctacaactggtttgccaaccggcrcaaagaagaagccttccggcacaagctggccatggacacgtacagcgggccccccccagggccaggcccgggacctgcgctgcccgctcacagctcccct

SEQ ID NO: 4020 - DNA, 201 bp, Homo sapiens
catcccacagcgggaggtggtcgataccactggcctcaaccagtcccacctgtcccaacacctcaacaagggcactcccatgaagacgcagaagcgggccrccctgtacacctggtacgtccgcaagcagcgagaggtggcgcagcagttcacccatgcagggcagggagggctgattgaagagcccacaggtgatgagct

SEQ ID NO: 4021 - DNA, 201 bp, Homo sapiens
cgtccgcaagcagcgagaggtggcgcagcagttcacccatgcagggcagggagggctgattgaagagcccacaggtgatgagctaccaaccaagaaggggbggaggaaccgtttcaagtggggcccagcatcccagcagatcctgttccaggcctatgagaggcagaagaaccctagcaaggaggagcgagagacgctagt

SEQ ID NO: 4022 - DNA, 201 bp, Homo sapiens
tagggcggaatgcatccagagaggggtgtccccatcacaggcacaggggctgggctccaacctcgtcacggaggtgcgtgtctacaactggtttgccaacbggcgcaaagaagaagccttccggcacaagctggccatggacacgtacagcgggccccccccagggccaggcccgggacctgcgctgcccgctcacagctc

SEQ ID NO: 4023 - DNA, 201 bp, Homo sapiens
agaggtggcgcagcagttcacccatgcagggcagggagggctgattgaagagcccacaggtgatgagctaccaaccaagaaggggcggaggaaccgtttcmagtggggcccagcatcccagcagatcctgttccaggcctatgagaggcagaagaaccctagcaaggaggagcgagagacgctagtggaggagtgcaatag

SEQ ID NO: 4024 - DNA, 201 bp, Homo sapiens
agccgagccatggtttctaaactgagccagctgcagacggagctcctggcggccctgctcgagtcagggctgagcaaagaggcactgatccaggcactggrtgagccggggccctacctcctggctggagaaggccccctggacaagggggagtcctgcggcggcggtcgaggggagctggctgagctgcccaatgggctg

SEQ ID NO: 4025 - DNA, 201 bp, Homo sapiens
ggaggcggcccaccagaaagccgtggtggagacccttctgcaggaggacccgtggcgtgtggcgaagatggtcaagtcctacctgcagcagcacaacatcmcacagcgggaggtggtcgataccactggcctcaaccagtcccacctgtcccaacacctcaacaagggcactcccatgaagacgcagaagcgggccgccct

SEQ ID NO: 4026 - DNA, 201 bp, Homo sapiens
gcggccctgctcgagtcagggctgagcaaagaggcactgatccaggcactgggtgagccggggccctacctcctggctggagaaggccccctggacaaggrggagtcctgcggcggcggtcgaggggagctggctgagctgcccaatgggctgggggagactcggggctccgaggacgagacggacgacgatggggaagac

SEQ ID NO: 4027 - DNA, 201 bp, Homo sapiens
gcacaacatcccacagcgggaggtggtcgataccactggcctcaaccagtcccacctgtcccaacacctcaacaagggcactcccatgaagacgcagaagygggccgccctgtacacctggtacgtccgcaagcagcgagaggtggcgcagcagttcacccatgcagggcagggagggctgattgaagagcccacaggtga

SEQ ID NO: 4028 - DNA, 201 bp, Homo sapiens
agggcggaatgcatccagagaggggtgtccccatcacaggcacaggggctgggctccaacctcgtcacggaggtgcgtgtctacaactggtttgccaaccrgcgcaaagaagaagccttccggcacaagctggccatggacacgtacagcgggccccccccagggccaggcccgggacctgcgctgcccgctcacagctcc

SEQ ID NO: 4029 - DNA, 201 bp, Homo sapiens
gtccgcaagcagcgagaggtggcgcagcagttcacccatgcagggcagggagggctgattgaagagcccacaggtgatgagctaccaaccaagaaggggcrgaggaaccgtttcaagtggggcccagcatcccagcagatcctgttccaggcctatgagaggcagaagaaccctagcaaggaggagcgagagacgctagtg

SEQ ID NO: 4030 - DNA, 201 bp, Homo sapiens
tccaacctcgtcacggaggtgcgtgtctacaactggtttgccaaccggcgcaaagaagaagccttccggcacaagctggccatggacacgtacagcgggcsccccccagggccaggcccgggacctgcgctgcccgctcacagctcccctggcctgcctccacctgccctctcccccagtaaggtccacggtgtgcgctat

SEQ ID NO: 4031 - DNA, 201 bp, Homo sapiens
gtacagcgggccccccccagggccaggcccgggacctgcgctgcccgctcacagctcccctggcctgcctccacctgccctctcccccagtaaggtccacrgtgtgcgctatggacagcctgcgaccagtgagactgcagaagtaccctcaagcagcggcggtcccttagtgacagtgtctacacccctccaccaagtgtc

SEQ ID NO: 4032 - DNA, 201 bp, Homo sapiens
cagccccagaacctcatcatggcctcacttcctggggtcatgaccatcgggcctggtgagcctgcctccctgggtcctacgttcaccaacacaggtgcctscaccctggtcatcggtaagctggtggggatgggtgggcacctgggtgggaggctcatggggcaaccgcagaatccaggagctggaagagccactgggact

SEQ ID NO: 4033 - DNA, 201 bp, Homo sapiens
ccccagaacctcatcatggcctcacttcctggggtcatgaccatcgggcctggtgagcctgcctccctgggtcctacgttcaccaacacaggtgcctccaycctggtcatcggtaagctggtggggatgggtgggcacctgggtgggaggctcatggggcaaccgcagaatccaggagctggaagagccactgggactcat

SEQ ID NO: 4034 - DNA, 158 bp, Homo sapiens
cgtggccctgtggcagccgagccatggtttctaaactgagccagctgcagacggagcwcctggcggccctgctcgagtcagggctgagcaaagaggcactgatccaggcactgggtgagccggggccctacctcctggctggagaaggccccctggac

SEQ ID NO: 4035 - DNA, 142 bp, Homo sapiens
cgtggccctgtggcagccgagccatggtttctaaactgagcyagctgcagacggagctcctggcggccctgctcgagtcagggctgagcaaagaggcactgatccaggcactgggtgagccggggccctacctcctggctgg

SEQ ID NO: 4036 - DNA, 201 bp, Homo sapiens
ggcccaccagaaagccgtggtggagacccttctgcaggaggacccgtggcgtgtggcgaagatggtcaagtcctacctgcagcagcacaacatcccacagygggaggtggtcgataccactggcctcaaccagtcccacctgtcccaacacctcaacaagggcactcccatgaagacgcagaagcgggccgccctgtacac

SEQ ID NO: 4037 - DNA, 201 bp, Homo sapiens
caggaggacccgtggcgtgtggcgaagatggtcaagtcctacctgcagcagcacaacatcccacagcgggaggtggtcgataccactggcctcaaccagtyccacctgtcccaacacctcaacaagggcactcccatgaagacgcagaagcgggccgccctgtacacctggtacgtccgcaagcagcgagaggtggcgcag

SEQ ID NO: 4038 - DNA, 201 bp, Homo sapiens
gaggaggcggcccaccagaaagccgtggtggagacccttctgcaggaggacccgtggcgtgtggcgaagatggtcaagtcctacctgcagcagcacaacawcccacagcgggaggtggtcgataccactggcctcaaccagtcccacctgtcccaacacctcaacaagggcactcccatgaagacgcagaagcgggccgcc

SEQ ID NO: 4039 - DNA, 201 bp, Homo sapiens
ggaggacccgtggcgtgtggcgaagatggtcaagtcctacctgcagcagcacaacatcccacagcgggaggtggtcgataccactggcctcaaccagtccyacctgtcccaacacctcaacaagggcactcccatgaagacgcagaagcgggccgccctgtacacctggtacgtccgcaagcagcgagaggtggcgcagca

SEQ ID NO: 4040 - DNA, 201 bp, Homo sapiens
cgctatggacagcctgcgaccagtgagactgcagaagtaccctcaagcagcggcggtcccttagtgacagtgtctacacccctccaccaagtgtcccccaygggcctggagcccagccacagcctgctgagtacagaagccaagctggtctcagcagctgggggccccctcccccctgtcagcaccctgacagcactgcac

SEQ ID NO: 4041 - DNA, 181 bp, Homo sapiens
cgtggccctgtggcagccgagccatggtttctaaactgagccagctgcagacggagctcctggcggccctgctcgagtcarggctgagcaaagaggcactgatccaggcactgggtgagccggggccctacctcctggctggagaaggccccctggacaagggggagtcctgcggcggcgg

SEQ ID NO: 4042 - DNA, 201 bp, Homo sapiens
aaggaggagcgagagacgctagtggaggagtgcaatagggcggaatgcatccagagaggggtgtccccatcacaggcacaggggctgggctccaacctcgwcacggaggtgcgtgtctacaactggtttgccaaccggcgcaaagaagaagccttccggcacaagctggccatggacacgtacagcgggccccccccaggg

SEQ ID NO: 4043 - DNA, 201 bp, Homo sapiens
gcccaccagaaagccgtggtggagacccttctgcaggaggacccgtggcgtgtggcgaagatggtcaagtcctacctgcagcagcacaacatcccacagcrggaggtggtcgataccactggcctcaaccagtcccacctgtcccaacacctcaacaagggcactcccatgaagacgcagaagcgggccgccctgtacacc

SEQ ID NO: 4044 - DNA, 201 bp, Homo sapiens
cacaacatcccacagcgggaggtggtcgataccactggcctcaaccagtcccacctgtcccaacacctcaacaagggcactcccatgaagacgcagaagcrggccgccctgtacacctggtacgtccgcaagcagcgagaggtggcgcagcagttcacccatgcagggcagggagggctgattgaagagcccacaggtgat

SEQ ID NO: 4045 - DNA, 201 bp, Homo sapiens
agcacaacatcccacagcgggaggtggtcgataccactggcctcaaccagtcccacctgtcccaacacctcaacaagggcactcccatgaagacgcagaakcgggccgccctgtacacctggtacgtccgcaagcagcgagaggtggcgcagcagttcacccatgcagggcagggagggctgattgaagagcccacaggtg

SEQ ID NO: 4046 - DNA, 201 bp, Homo sapiens
ggcggaatgcatccagagaggggtgtccccatcacaggcacaggggctgggctccaacctcgtcacggaggtgcgtgtctacaactggtttgccaaccggygcaaagaagaagccttccggcacaagctggccatggacacgtacagcgggccccccccagggccaggcccgggacctgcgctgcccgctcacagctcccc

SEQ ID NO: 4047 - DNA, 201 bp, Homo sapiens
caccctgacagcactgcacagcttggagcagacatccccaggcctcaaccagcagccccagaacctcatcatggcctcacttcctggggtcatgaccatcsggcctggtgagcctgcctccctgggtcctacgttcaccaacacaggtgcctccaccctggtcatcggtaagctggtggggatgggtgggcacctgggtgg

SEQ ID NO: 4048 - DNA, 201 bp, Homo sapiens
ccaccagaaagccgtggtggagacccttctgcaggaggacccgtggcgtgtggcgaagatggtcaagtcctacctgcagcagcacaacatcccacagcggraggtggtcgataccactggcctcaaccagtcccacctgtcccaacacctcaacaagggcactcccatgaagacgcagaagcgggccgccctgtacacctg

SEQ ID NO: 4049 - DNA, 201 bp, Homo sapiens
aagcgggccgccctgtacacctggtacgtccgcaagcagcgagaggtggcgcagcagttcacccatgcagggcagggagggctgattgaagagcccacagrtgatgagctaccaaccaagaaggggcggaggaaccgtttcaagtggggcccagcatcccagcagatcctgttccaggcctatgagaggcagaagaaccct

SEQ ID NO: 4050 - DNA, 201 bp, Homo sapiens
cagcgagaggtggcgcagcagttcacccatgcagggcagggagggctgattgaagagcccacaggtgatgagctaccaaccaagaaggggcggaggaaccrtttcaagtggggcccagcatcccagcagatcctgttccaggcctatgagaggcagaagaaccctagcaaggaggagcgagagacgctagtggaggagtgc

SEQ ID NO: 4051 - DNA, 201 bp, Homo sapiens
ctgattgaagagcccacaggtgatgagctaccaaccaagaaggggcggaggaaccgtttcaagtggggcccagcatcccagcagatcctgttccaggcctrtgagaggcagaagaaccctagcaaggaggagcgagagacgctagtggaggagtgcaatagggcggaatgcatccagagaggggtgtccccatcacaggca

SEQ ID NO: 4052 - DNA, 201 bp, Homo sapiens
gaaccctagcaaggaggagcgagagacgctagtggaggagtgcaatagggcggaatgcatccagagaggggtgtccccatcacaggcacaggggctgggcwccaacctcgtcacggaggtgcgtgtctacaactggtttgccaaccggcgcaaagaagaagccttccggcacaagctggccatggacacgtacagcgggcc

SEQ ID NO: 4053 - DNA, 201 bp, Homo sapiens
ccagaaagccgtggtggagacccttctgcaggaggacccgtggcgtgtggcgaagatggtcaagtcctacctgcagcagcacaacatcccacagcgggagrtggtcgataccactggcctcaaccagtcccacctgtcccaacacctcaacaagggcactcccatgaagacgcagaagcgggccgccctgtacacctggta

SEQ ID NO: 4054 - DNA, 201 bp, Homo sapiens
agctgcccaatgggctgggggagactcggggctccgaggacgagacggacgacgatggggaagacttcacgccacccatcctcaaagagctggagaacctyagccctgaggaggcggcccaccagaaagccgtggtggagacccttctgcaggaggacccgtggcgtgtggcgaagatggtcaagtcctacctgcagcagc

SEQ ID NO: 4055 - DNA, 201 bp, Homo sapiens
gcagaagaaccctagcaaggaggagcgagagacgctagtggaggagtgcaatagggcggaatgcatccagagaggggtgtccccatcacaggcacaggggmtgggctccaacctcgtcacggaggtgcgtgtctacaactggtttgccaaccggcgcaaagaagaagccttccggcacaagctggccatggacacgtacag

SEQ ID NO: 4056 - DNA, 201 bp, Homo sapiens
gctccaacctcgtcacggaggtgcgtgtctacaactggtttgccaaccggcgcaaagaagaagccttccggcacaagctggccatggacacgtacagcggsccccccccagggccaggcccgggacctgcgctgcccgctcacagctcccctggcctgcctccacctgccctctcccccagtaaggtccacggtgtgcgct

SEQ ID NO: 4057 - DNA, 201 bp, Homo sapiens
gtggccctgtggcagccgagccatggtttctaaactgagccagctgcagacggagctcctggcggccctgctcgagtcagggctgagcaaagaggcactgmtccaggcactgggtgagccggggccctacctcctggctggagaaggccccctggacaagggggagtcctgcggcggcggtcgaggggagctggctgagct

SEQ ID NO: 4058 - DNA, 174 bp, Homo sapiens
cgtggccctgtggcagccgagccatggtttctaaactgagccagctgcagacggagctcctggcggccctgctsgagtcagggctgagcaaagaggcactgatccaggcactgggtgagccggggccctacctcctggctggagaaggccccctggacaagggggagtcctgcg

SEQ ID NO: 4059 - DNA, 201 bp, Homo sapiens
ctggagaacctcagccctgaggaggcggcccaccagaaagccgtggtggagacccttctgcaggaggacccgtggcgtgtggcgaagatggtcaagtcctrcctgcagcagcacaacatcccacagcgggaggtggtcgataccactggcctcaaccagtcccacctgtcccaacacctcaacaagggcactcccatgaag

SEQ ID NO: 4060 - DNA, 201 bp, Homo sapiens
tggcctcaaccagtcccacctgtcccaacacctcaacaagggcactcccatgaagacgcagaagcgggccgccctgtacacctggtacgtccgcaagcagygagaggtggcgcagcagttcacccatgcagggcagggagggctgattgaagagcccacaggtgatgagctaccaaccaagaaggggcggaggaaccgttt

SEQ ID NO: 4061 - DNA, 201 bp, Homo sapiens
gaggaaccgtttcaagtggggcccagcatcccagcagatcctgttccaggcctatgagaggcagaagaaccctagcaaggaggagcgagagacgctagtgkaggagtgcaatagggcggaatgcatccagagaggggtgtccccatcacaggcacaggggctgggctccaacctcgtcacggaggtgcgtgtctacaactg

SEQ ID NO: 4062 - DNA, 201 bp, Homo sapiens
cccagcatcccagcagatcctgttccaggcctatgagaggcagaagaaccctagcaaggaggagcgagagacgctagtggaggagtgcaatagggcggaabgcatccagagaggggtgtccccatcacaggcacaggggctgggctccaacctcgtcacggaggtgcgtgtctacaactggtttgccaaccggcgcaaaga

SEQ ID NO: 4063 - DNA, 201 bp, Homo sapiens
ggggagactcggggctccgaggacgagacggacgacgatggggaagacttcacgccacccatcctcaaagagctggagaacctcagccctgaggaggcggyccaccagaaagccgtggtggagacccttctgcaggaggacccgtggcgtgtggcgaagatggtcaagtcctacctgcagcagcacaacatcccacagcgg

SEQ ID NO: 4064 - DNA, 201 bp, Homo sapiens
gcagcgagaggtggcgcagcagttcacccatgcagggcagggagggctgattgaagagcccacaggtgatgagctaccaaccaagaaggggcggaggaacygtttcaagtggggcccagcatcccagcagatcctgttccaggcctatgagaggcagaagaaccctagcaaggaggagcgagagacgctagtggaggagtg

SEQ ID NO: 4065 - DNA, 201 bp, Homo sapiens
gaggagcgagagacgctagtggaggagtgcaatagggcggaatgcatccagagaggggtgtccccatcacaggcacaggggctgggctccaacctcgtcayggaggtgcgtgtctacaactggtttgccaaccggcgcaaagaagaagccttccggcacaagctggccatggacacgtacagcgggccccccccagggcca

SEQ ID NO: 4066 - DNA, 201 bp, Homo sapiens
agagacgctagtggaggagtgcaatagggcggaatgcatccagagaggggtgtccccatcacaggcacaggggctgggctccaacctcgtcacggaggtgygtgtctacaactggtttgccaaccggcgcaaagaagaagccttccggcacaagctggccatggacacgtacagcgggccccccccagggccaggcccggg

SEQ ID NO: 4067 - DNA, 201 bp, Homo sapiens; identical to SEQ ID NO: 4018

SEQ ID NO: 4068 - DNA, 201 bp, Homo sapiens; identical to SEQ ID NO: 4019

SEQ ID NO: 4069 - DNA, 201 bp, Homo sapiens
ccctcctaccagcagccgctcatgccacctgtgcagagccatgtgacccagagccccttcatggccaccatggctcagctgcagagcccccacggtgagcrccctgtgccccacacagcaggagatgatgatagaggttggctgtcaatggatgcaggggaaaggggtgcctggcaggcattgcagtctgcatgtgtctct

SEQ ID NO: 4070 - DNA, 201 bp, Homo sapiens
  misc_feature (1)...(201): n = A,T,C or G, or insertion/deletion polymorphism (see Tables 1-2)
agcagcctgaccaccctgcagcccgtccagttctcccagccgctgcacccctcctaccagcagccgctcatgccacctgtgcagagccatgtgacccaganccccttcatggccaccatggctcagctgcagagcccccacggtgagcgccctgtgccccacacagcaggagatgatgatagaggttggctgtcaatggat

SEQ ID NO: 4071 - DNA, 201 bp, Homo sapiens; identical to SEQ ID NO: 4020

SEQ ID NO: 4072 - DNA, 201 bp, Homo sapiens
gttcaccaacacaggtgcctccaccctggtcatcggcctggcctccacgcaggcacagagtgtgccggtcatcaacagcatgggcagcagcctgaccaccytgcagcccgtccagttctcccagccgctgcacccctcctaccagcagccgctcatgccacctgtgcagagccatgtgacccagagccccttcatggccac

SEQ ID NO: 4073 - DNA, 201 bp, Homo sapiens; identical to SEQ ID NO: 4021

SEQ ID NO: 4074 - DNA, 201 bp, Homo sapiens; identical to SEQ ID NO: 4022

SEQ ID NO: 4075 - DNA, 201 bp, Homo sapiens; identical to SEQ ID NO: 4023

SEQ ID NO: 4076 - DNA, 201 bp, Homo sapiens; identical to SEQ ID NO: 4025

SEQ ID NO: 4077 - DNA, 201 bp, Homo sapiens; identical to SEQ ID NO: 4024

SEQ ID NO: 4078 - DNA, 201 bp, Homo sapiens; identical to SEQ ID NO: 4027

SEQ ID NO: 4079 - DNA, 201 bp, Homo sapiens; identical to SEQ ID NO: 4026

SEQ ID NO: 4080 - DNA, 201 bp, Homo sapiens; identical to SEQ ID NO: 4028

SEQ ID NO: 4081 - DNA, 201 bp, Homo sapiens; identical to SEQ ID NO: 4029

SEQ ID NO: 4082 - DNA, 201 bp, Homo sapiens; identical to SEQ ID NO: 4030

SEQ ID NO: 4083 - DNA, 201 bp, Homo sapiens; identical to SEQ ID NO: 4031

SEQ ID NO: 4084 - DNA, 201 bp, Homo sapiens
cagccccagaacctcatcatggcctcacttcctggggtcatgaccatcgggcctggtgagcctgcctccctgggtcctacgttcaccaacacaggtgcctscaccctggtcatcggcctggcctccacgcaggcacagagtgtgccggtcatcaacagcatgggcagcagcctgaccaccctgcagcccgtccagttctcc

SEQ ID NO: 4085 - DNA, 158 bp, Homo sapiens; identical to SEQ ID NO: 4034

SEQ ID NO: 4086 - DNA, 201 bp, Homo sapiens
ccccagaacctcatcatggcctcacttcctggggtcatgaccatcgggcctggtgagcctgcctccctgggtcctacgttcaccaacacaggtgcctccaycctggtcatcggcctggcctccacgcaggcacagagtgtgccggtcatcaacagcatgggcagcagcctgaccaccctgcagcccgtccagttctcccag

SEQ ID NO: 4087 - DNA, 201 bp, Homo sapiens; identical to SEQ ID NO: 4036

SEQ ID NO: 4088 - DNA, 142 bp, Homo sapiens; identical to SEQ ID NO: 4035

SEQ ID NO: 4089 - DNA, 201 bp, Homo sapiens; identical to SEQ ID NO: 4037

SEQ ID NO: 4090 - DNA, 201 bp, Homo sapiens; identical to SEQ ID NO: 4038

SEQ ID NO: 4091 - DNA, 201 bp, Homo sapiens; identical to SEQ ID NO: 4039

SEQ ID NO: 4092 - DNA, 201 bp, Homo sapiens; identical to SEQ ID NO: 4040

SEQ ID NO: 4093 - DNA, 181 bp, Homo sapiens; identical to SEQ ID NO: 4041

SEQ ID NO: 4094 - DNA, 201 bp, Homo sapiens; identical to SEQ ID NO: 4042

SEQ ID NO: 4095 - DNA, 201 bp, Homo sapiens; identical to SEQ ID NO: 4043

SEQ ID NO: 4096 - DNA, 201 bp, Homo sapiens
gggcagcagcctgaccaccctgcagcccgtccagttctcccagccgctgcacccctcctaccagcagccgctcatgccacctgtgcagagccatgtgaccyagagccccttcatggccaccatggctcagctgcagagcccccacggtgagcgccctgtgccccacacagcaggagatgatgatagaggttggctgtcaat

SEQ ID NO: 4097 - DNA, 201 bp, Homo sapiens; identical to SEQ ID NO: 4044

SEQ ID NO: 4098 - DNA, 201 bp, Homo sapiens; identical to SEQ ID NO: 4045

SEQ ID NO: 4099 - DNA, 201 bp, Homo sapiens; identical to SEQ ID NO: 4046

SEQ ID NO: 4100 - DNA, 201 bp, Homo sapiens
caccctgacagcactgcacagcttggagcagacatccccaggcctcaaccagcagccccagaacctcatcatggcctcacttcctggggtcatgaccatcsggcctggtgagcctgcctccctgggtcctacgttcaccaacacaggtgcctccaccctggtcatcggcctggcctccacgcaggcacagagtgtgccggt

SEQ ID NO: 4101 - DNA, 201 bp, Homo sapiens; identical to SEQ ID NO: 4049

SEQ ID NO: 4102 - DNA, 201 bp, Homo sapiens; identical to SEQ ID NO: 4050

SEQ ID NO: 4103 - DNA, 201 bp, Homo sapiens; identical to SEQ ID NO: 4048

SEQ ID NO: 4104 - DNA, 107 bp, Homo sapiens
acacagcaggagatgatgatagaggttggctgtcaatggatgcaggggaaaggggtgcctggcaggcattgcagtctgcatgtgtctctgggacaagtgtktttccg

SEQ ID NO: 4105 - DNA, 201 bp, Homo sapiens; identical to SEQ ID NO: 4051

SEQ ID NO: 4106 - DNA, 201 bp, Homo sapiens; identical to SEQ ID NO: 4052

SEQ ID NO: 4107 - DNA, 201 bp, Homo sapiens; identical to SEQ ID NO: 4053

SEQ ID NO: 4108 - DNA, 201 bp, Homo sapiens
caccctggtcatcggcctggcctccacgcaggcacagagtgtgccggtcatcaacagcatgggcagcagcctgaccaccctgcagcccgtccagttctccyagccgctgcacccctcctaccagcagccgctcatgccacctgtgcagagccatgtgacccagagccccttcatggccaccatggctcagctgcagagccc

SEQ ID NO: 4109 - DNA, 201 bp, Homo sapiens; identical to SEQ ID NO: 4054

SEQ ID NO: 4110 - DNA, 201 bp, Homo sapiens; identical to SEQ ID NO: 4055

SEQ ID NO: 4111 - DNA, 201 bp, Homo sapiens; identical to SEQ ID NO: 4056

SEQ ID NO: 4112 - DNA, 201 bp, Homo sapiens; identical to SEQ ID NO: 4057

SEQ ID NO: 4113 - DNA, 174 bp, Homo sapiens; identical to SEQ ID NO: 4058

SEQ ID NO: 4114 - DNA, 201 bp, Homo sapiens; identical to SEQ ID NO: 4059

SEQ ID NO: 4115 - DNA, 201 bp, Homo sapiens; identical to SEQ ID NO: 4060

SEQ ID NO: 4116 - DNA, 201 bp, Homo sapiens; identical to SEQ ID NO: 4061

SEQ ID NO: 4117 - DNA, 201 bp, Homo sapiens; identical to SEQ ID NO: 4062

SEQ ID NO: 4118 - DNA, 201 bp, Homo sapiens; identical to SEQ ID NO: 4063

SEQ ID NO: 4119 - DNA, 201 bp, Homo sapiens; identical to SEQ ID NO: 4064

SEQ ID NO: 4120 - DNA, 201 bp, Homo sapiens; identical to SEQ ID NO: 4065

SEQ ID NO: 4121 - DNA, 201 bp, Homo sapiens; identical to SEQ ID NO: 4066

SEQ ID NO: 4122 - DNA, 201 bp, Homo sapiens; identical to SEQ ID NO: 4018

SEQ ID NO: 4123 - DNA, 201 bp, Homo sapiens
cagagccatgtgacccagagccccttcatggccaccatggctcagctgcagagcccccacgccctctacagccacaagcccgaggtggcccagtacacccrcacgggcctgctcccgcagactatgctcatcaccgacaccaccaacctgagcgccctggccagcctcacgcccaccaagcaggtcttcacctcagacact

SEQ ID NO: 4124 - DNA, 201 bp, Homo sapiens
cccttcatggccaccatggctcagctgcagagcccccacgccctctacagccacaagcccgaggtggcccagtacacccacacgggcctgctcccgcagaytatgctcatcaccgacaccaccaacctgagcgccctggccagcctcacgcccaccaagcaggtcttcacctcagacactgaggcctccagtgagtccggg

SEQ ID NO: 4125 - DNA, 201 bp, Homo sapiens; identical to SEQ ID NO: 4020

SEQ ID NO: 4126 - DNA, 201 bp, Homo sapiens; identical to SEQ ID NO: 4021

SEQ ID NO: 4127 - DNA, 201 bp, Homo sapiens; identical to SEQ ID NO: 4022

SEQ ID NO: 4128 - DNA, 201 bp, Homo sapiens
cgccagccccacagtgtcctccagcagcctggtgctgtaccagagctcagactccagcaatggccagagccacctgctgccatccaaccacagcgtcatcragaccttcatctccacccagatggcctcttcctcccagtaaccacggcacctgggccctggggcctgtactgcctgcttggggggtgatgagggcagcag

SEQ ID NO: 4129 - DNA, 201 bp, Homo sapiens; identical to SEQ ID NO: 4023

SEQ ID NO: 4130 - DNA, 201 bp, Homo sapiens; identical to SEQ ID NO: 4026

SEQ ID NO: 4131 - DNA, 201 bp, Homo sapiens; identical to SEQ ID NO: 4028

SEQ ID NO: 4132 - DNA, 201 bp, Homo sapiens
ggccagcctcacgcccaccaagcaggtcttcacctcagacactgaggcctccagtgagtccgggcttcacacgccggcatctcaggccaccaccctccacrtccccagccaggaccctgccggcatccagcacctgcagccggcccaccggctcagcgccagccccacagtgtcctccagcagcctggtgctgtaccagag

SEQ ID NO: 4133 - DNA, 201 bp, Homo sapiens
gctcagcgccagccccacagtgtcctccagcagcctggtgctgtaccagagctcagactccagcaatggccagagccacctgctgccatccaaccacagcrtcatcgagaccttcatctccacccagatggcctcttcctcccagtaaccacggcacctgggccctggggcctgtactgcctgcttggggggtgatgaggg

SEQ ID NO: 4134 - DNA, 201 bp, Homo sapiens; identical to SEQ ID NO: 4030

SEQ ID NO: 4135 - DNA, 201 bp, Homo sapiens; identical to SEQ ID NO: 4031

SEQ ID NO: 4136 - DNA, 201 bp, Homo sapiens; identical to SEQ ID NO: 4084

SEQ ID NO: 4137 - DNA, 201 bp, Homo sapiens; identical to SEQ ID NO: 4086

SEQ ID NO: 4138 - DNA, 158 bp, Homo sapiens; identical to SEQ ID NO: 4034

SEQ ID NO: 4139 - DNA, 142 bp, Homo sapiens; identical to SEQ ID NO: 4035

SEQ ID NO: 4140 - DNA, 201 bp, Homo sapiens
agccacaagcccgaggtggcccagtacacccacacgggcctgctcccgcagactatgctcatcaccgacaccaccaacctgagcgccctggccagcctcasgcccaccaagcaggtcttcacctcagacactgaggcctccagtgagtccgggcttcacacgccggcatctcaggccaccaccctccacgtccccagccag

SEQ ID NO: 4141 - DNA, 201 bp, Homo sapiens; identical to SEQ ID NO: 4036

SEQ ID NO: 4142 - DNA, 201 bp, Homo sapiens
tccagtgagtccgggcttcacacgccggcatctcaggccaccaccctccacgtccccagccaggaccctgccggcatccagcacctgcagccggcccaccrgctcagcgccagccccacagtgtcctccagcagcctggtgctgtaccagagctcagactccagcaatggccagagccacctgctgccatccaaccacagc

SEQ ID NO: 4143 - DNA, 201 bp, Homo sapiens
ctccagtgagtccgggcttcacacgccggcatctcaggccaccaccctccacgtccccagccaggaccctgccggcatccagcacctgcagccggcccacsggctcagcgccagccccacagtgtcctccagcagcctggtgctgtaccagagctcagactccagcaatggccagagccacctgctgccatccaaccacag

SEQ ID NO: 4144 - DNA, 201 bp, Homo sapiens; identical to SEQ ID NO: 4037

SEQ ID NO: 4145 - DNA, 201 bp, Homo sapiens; identical to SEQ ID NO: 4038

SEQ ID NO: 4146 - DNA, 201 bp, Homo sapiens
caggccaccaccctccacgtccccagccaggaccctgccggcatccagcacctgcagccggcccaccggctcagcgccagccccacagtgtcctccagcakcctggtgctgtaccagagctcagactccagcaatggccagagccacctgctgccatccaaccacagcgtcatcgagaccttcatctccacccagatggcc

SEQ ID NO: 4147 - DNA, 201 bp, Homo sapiens; identical to SEQ ID NO: 4039

SEQ ID NO: 4148 - DNA, 201 bp, Homo sapiens; identical to SEQ ID NO: 4040

SEQ ID NO: 4149 - DNA, 181 bp, Homo sapiens; identical to SEQ ID NO: 4041

SEQ ID NO: 4150 - DNA, 201 bp, Homo sapiens; identical to SEQ ID NO: 4042

SEQ ID NO: 4151 - DNA, 201 bp, Homo sapiens; identical to SEQ ID NO: 4044

SEQ ID NO: 4152 - DNA, 201 bp, Homo sapiens
gtcaccaatgtacccaccgggccactccttcctgccccaactccttccagctagtgacccacatgccatttgtactgaccccatcacctactcacacaggmatttcctgggtggctactctgtgccagagcctggggctctaacgcctgagcccagggaggccgaagctaacagggaaggcaggcagggctctcctggctt

SEQ ID NO: 4153 - DNA, 201 bp, Homo sapiens
gcgccagccccacagtgtcctccagcagcctggtgctgtaccagagctcagactccagcaatggccagagccacctgctgccatccaaccacagcgtcatsgagaccttcatctccacccagatggcctcttcctcccagtaaccacggcacctgggccctggggcctgtactgcctgcttggggggtgatgagggcagca

SEQ ID NO: 4154 - DNA, 201 bp, Homo sapiens
ggcctatggagagccctgggaccgctacaccactctggcagccacacttctcaggacacaggcctgtgtagctgtgacctgctgagctctgagaggccctrgatcagcgtggccttgttctgtcaccaatgtacccaccgggccactccttcctgccccaactccttccagctagtgacccacatgccatttgtactgacc

SEQ ID NO: 4155 - DNA, 201 bp, Homo sapiens
cgtggcccttcctggacagctgtgcctcgctccccactctgctctgatgcatcagaaagggagggctctgaggcgccccaacccgtggaggctgctcgggktgcacaggagggggtcgtggagagctaggagcaaagcctgttcatggcagatgtaggagggactgtcgctgcttcgtgggatacagtcttcttacttgga

SEQ ID NO: 4156 - DNA, 201 bp, Homo sapiens
gcaggtcttcacctcagacactgaggcctccagtgagtccgggcttcacacgccggcatctcaggccaccaccctccacgtccccagccaggaccctgccrgcatccagcacctgcagccggcccaccggctcagcgccagccccacagtgtcctccagcagcctggtgctgtaccagagctcagactccagcaatggcca

SEQ ID NO: 4157 - DNA, 201 bp, Homo sapiens; identical to SEQ ID NO: 4048

SEQ ID NO: 4158 - DNA, 201 bp, Homo sapiens; identical to SEQ ID NO: 4051

SEQ ID NO: 4159 - DNA, 201 bp, Homo sapiens; identical to SEQ ID NO: 4052

SEQ ID NO: 4160 - DNA, 201 bp, Homo sapiens; identical to SEQ ID NO: 4108

SEQ ID NO: 4161 - DNA, 201 bp, Homo sapiens; identical to SEQ ID NO: 4057

SEQ ID NO: 4162 - DNA, 174 bp, Homo sapiens; identical to SEQ ID NO: 4058

SEQ ID NO: 4163 - DNA, 201 bp, Homo sapiens; identical to SEQ ID NO: 4065

SEQ ID NO: 4164 - DNA, 201 bp, Homo sapiens; identical to SEQ ID NO: 4066

SEQ ID NO: 4165 - DNA, 201 bp, Homo sapiens; identical to SEQ ID NO: 4019

SEQ ID NO: 4166 - DNA, 201 bp, Homo sapiens
  misc_feature (1)...(201): n = A,T,C or G, or insertion/deletion polymorphism (see Tables 1-2)
agcagcctgaccaccctgcagcccgtccagttctcccagccgctgcacccctcctaccagcagccgctcatgccacctgtgcagagccatgtgacccaganccccttcatggccaccatggctcagctgcagagcccccacgccctctacagccacaagcccgaggtggcccagtacacccacacgggcctgctcccgcag

SEQ ID NO: 4167 - DNA, 201 bp, Homo sapiens; identical to SEQ ID NO: 4072

SEQ ID NO: 4168 - DNA, 201 bp, Homo sapiens
cttcatggccaccatggctcagctgcagagcccccacgccctctacagccacaagcccgaggtggcccagtacacccacacgggcctgctcccgcagactrtgctcatcaccgacaccaccaacctgagcgccctggccagcctcacgcccaccaagcaggtcttcacctcagacactgaggcctccagtgagtccgggct

SEQ ID NO: 4169 - DNA, 201 bp, Homo sapiens; identical to SEQ ID NO: 4025

SEQ ID NO: 4170 - DNA, 201 bp, Homo sapiens; identical to SEQ ID NO: 4024

SEQ ID NO: 4171 - DNA, 201 bp, Homo sapiens; identical to SEQ ID NO: 4027

SEQ ID NO: 4172 - DNA, 201 bp, Homo sapiens; identical to SEQ ID NO: 4029

SEQ ID NO: 4173 - DNA, 201 bp, Homo sapiens
agccccacagtgtcctccagcagcctggtgctgtaccagagctcagactccagcaatggccagagccacctgctgccatccaaccacagcgtcatcgagaycttcatctccacccagatggcctcttcctcccagtaaccacggcacctgggccctggggcctgtactgcctgcttggggggtgatgagggcagcagccag

SEQ ID NO: 4174 - DNA, 201 bp, Homo sapiens; identical to SEQ ID NO: 4043

SEQ ID NO: 4175 - DNA, 201 bp, Homo sapiens
gggcagcagcctgaccaccctgcagcccgtccagttctcccagccgctgcacccctcctaccagcagccgctcatgccacctgtgcagagccatgtgaccyagagccccttcatggccaccatggctcagctgcagagcccccacgccctctacagccacaagcccgaggtggcccagtacacccacacgggcctgctccc

SEQ ID NO: 4176 - DNA, 201 bp, Homo sapiens; identical to SEQ ID NO: 4045

SEQ ID NO: 4177 - DNA, 201 bp, Homo sapiens; identical to SEQ ID NO: 4046

SEQ ID NO: 4178 - DNA, 201 bp, Homo sapiens
cagagccccttcatggccaccatggctcagctgcagagcccccacgccctctacagccacaagcccgaggtggcccagtacacccacacgggcctgctccygcagactatgctcatcaccgacaccaccaacctgagcgccctggccagcctcacgcccaccaagcaggtcttcacctcagacactgaggcctccagtgag

SEQ ID NO: 4179 - DNA, 201 bp, Homo sapiens; identical to SEQ ID NO: 4100

SEQ ID NO: 4180 - DNA, 201 bp, Homo sapiens; identical to SEQ ID NO: 4049

SEQ ID NO: 4181 - DNA, 201 bp, Homo sapiens; identical to SEQ ID NO: 4050

SEQ ID NO: 4182 - DNA, 201 bp, Homo sapiens; identical to SEQ ID NO: 4053

SEQ ID NO: 4183 - DNA, 201 bp, Homo sapiens; identical to SEQ ID NO: 4054

SEQ ID NO: 4184 - DNA, 201 bp, Homo sapiens; identical to SEQ ID NO: 4055

SEQ ID NO: 4185 - DNA, 201 bp, Homo sapiens; identical to SEQ ID NO: 4056

SEQ ID NO: 4186 - DNA, 201 bp, Homo sapiens; identical to SEQ ID NO: 4059

SEQ ID NO: 4187 - DNA, 201 bp, Homo sapiens; identical to SEQ ID NO: 4060

SEQ ID NO: 4188 - DNA, 201 bp, Homo sapiens; identical to SEQ ID NO: 4061

SEQ ID NO: 4189 - DNA, 201 bp, Homo sapiens; identical to SEQ ID NO: 4062

SEQ ID NO: 4190 - DNA, 201 bp, Homo sapiens; identical to SEQ ID NO: 4063

SEQ ID NO: 4191 - DNA, 201 bp, Homo sapiens; identical to SEQ ID NO: 4064

SEQ ID NO: 4192 - DNA, 144 bp, Homo sapiens
acaatcctttgcggtggttcaagatggcggcgcccagtggcacwgtgagcgattcggaaagtagtaacagcagtagcgatgcggaggagctggagcggtgccgcgaggcggcaatgccggcttggggcttggagcaacgcccgc

SEQ ID NO: 4193 - DNA, 201 bp, Homo sapiens
ttcggaaagtagtaacagcagtagcgatgcggaggagctggagcggtgccgcgaggcggcaatgccggcttggggcttggagcaacgcccgcacgtggcarggaagccaagagccggtgctgcaaatagccagttgtcaacctcccaaccgagcctcaggcataaggtgaatgagcatgaacaagatggcaacgagcttca

SEQ ID NO: 4194 - DNA, 201 bp, Homo sapiens
ctggtgtgagaaacagtttttagaaaatgagagaagggatccccaagaggccaaggcccagagaaacttttgttcttctctccttagcccacatagacttmacagaatcgtctgagaaaggagagctttttcacccctggctttctagaattttctttgtctgcatttgtgaatataccacacatgatggtgtctctgagc

SEQ ID NO: 4195 - DNA, 201 bp, Homo sapiens
aaagctaaggtacagaaagtcgctttggaggatgatggtttccgccttttcttcacatctgtccctggaggccgtgagaaggaagagtctccccaaccccsccgaaagcgacagccctccagctccagtgaggacagtgacgaggagtggcggcggtgccgggaggcagctgtgtcggcgtccgacatcctacaggagtca

SEQ ID NO: 4196 - DNA, 201 bp, Homo sapiens
aaagaaaaagaaaagaagtagaagctcatggccagggatggtggctcacacctgtaatcccagcactttgggaggccgaggcaggtggatcacttgagccragttccagaccagcctaggcaacatggtgaaacctcgtctctataaaaaaaagaatacaaaaattagttgggcatggtagtgagcgcctgtgaggctgct

SEQ ID NO: 4197 - DNA, 112 bp, Homo sapiens
aagccaggagagccctgcctgccttccctgttagcttcggcctccctgggctcaggcgttagagccccaggctctggcacagagtagccacccaggaaatkcctgtgtgagt

SEQ ID NO: 4198 - DNA, 201 bp, Homo sapiens
agcgacagccctccagctccagtgaggacagtgacgaggagtggcggcggtgccgggaggcagctgtgtcggcgtccgacatcctacaggagtcagccatycacagccctggaacagtggagaaggaggcaaagaagaaaaggaagttgaaaaagaaagccaagaaggtggccagtgtcgactcggctgtcgctgccacca

SEQ ID NO: 4199 - DNA, 201 bp, Homo sapiens
aaaagaaagccaagaaggtggccagtgtcgactcggctgtcgctgccaccacccccaccagcatggccacagtccagaagcagaagtcaggtgagctcaayggggaccaggtgtcgcttgggaccaaaaagaagaaaaaggcaaagaaggccagcgagacctctccattcccaccagcaaagagtgctacagctatacctg

SEQ ID NO: 4200 - DNA, 201 bp, Homo sapiens
gctatacctgcaaactgaacccagccatgggcacagggctcagccagctccaaggacaaggtgtcccccccaccctggggacaaggcatttccaagccccmcctccctctccaagttcaaggactgggctggcaaacccagactgcccatgagaccctgatggtgatgaaggcttgctcgagagttgggccaaaaaagccc

SEQ ID NO: 4201 - DNA, 201 bp, Homo sapiens
ccttagcctggtgtgagaaacagtttttagaaaatgagagaagggatccccaagaggccaaggcccagagaaacttttgttcttctctccttagcccacawagacttcacagaatcgtctgagaaaggagagctttttcacccctggctttctagaattttctttgtctgcatttgtgaatataccacacatgatggtgtc

SEQ ID NO: 4202 - DNA, 201 bp, Homo sapiens
gctccagtgaggacagtgacgaggagtggcggcggtgccgggaggcagctgtgtcggcgtccgacatcctacaggagtcagccatccacagccctggaacwgtggagaaggaggcaaagaagaaaaggaagttgaaaaagaaagccaagaaggtggccagtgtcgactcggctgtcgctgccaccacccccaccagcatgg

SEQ ID NO: 4203 - DNA, 201 bp, Homo sapiens
agaaaatgagagaagggatccccaagaggccaaggcccagagaaacttttgttcttctctccttagcccacatagacttcacagaatcgtctgagaaaggrgagctttttcacccctggctttctagaattttctttgtctgcatttgtgaatataccacacatgatggtgtctctgagccgaccagattatggaaactca

SEQ ID NO: 4204 - DNA, 201 bp, Homo sapiens
tccccctttcacactggatccatcttgagccacagtcactggattgactttgctgtcaaaactactgacagggagcagcccccgggccgctggctggtggrcccccaatgacacccatgccagagaggtggggatcctgcctaaggttgtctacgggggcacttggaggacctggcgtgctcagacccaacagcaaaggaa

SEQ ID NO: 4205 - DNA, 201 bp, Homo sapiens
aggatgactgtgagcggatgaacatcacagtgaaaaatgaccctggccatcacattattgaggacatgtggcttggagtgactgtggccagccagggcccygcaggcagagttctggtctgtgcccaccgctacacccaggtgctgtggtcagggtcagaagaccagcggcgcatggtgggcaagtgctacgtgcgaggca

SEQ ID NO: 4206 - DNA, 201 bp, Homo sapiens
ctcggagctggtggaggagctgccggccgaaatcgagctgtggctggtgctggtggccgtgggtgcagggctgctgctgctggggctgatcatcctcctgmtgtggaagtgcggcttcttcaagcgagcccgcactcgcgccctgtatgaagctaagaggcagaaggcggagatgaagagccagccgtcagagacagagag

SEQ ID NO: 4207 - DNA, 201 bp, Homo sapiens
ggaaattgctcctgagcatcaacgtgacgaacacccggacctcggagcgctccggggaggacgcccacgaggcgctgctcaccctggtggtgcctcccgcyctgctgctgtcctcagtgcgcccccccggggcctgccaagctaatgagaccatcttttgcgagctggggaaccccttcaaacggaaccagaggatggagc

SEQ ID NO: 4208 - DNA, 201 bp, Homo sapiens
tggttctctgtggacattgactcggagctggtggaggagctgccggccgaaatcgagctgtggctggtgctggtggccgtgggtgcagggctgctgctgcwggggctgatcatcctcctgctgtggaagtgcggcttcttcaagcgagcccgcactcgcgccctgtatgaagctaagaggcagaaggcggagatgaagagc

SEQ ID NO: 4209 - DNA, 201 bp, Homo sapiens
ggggctggtgggcctggggaccctggtcctaggtctggagtggccctacgaagtcagcaatggcaagtggctgctgtatcccacggagatcaccgtccatrgcaatgggtcctggccctgccgaccacctggagaccttatcaaccctctcaacctcactctttctgaccctggggacaggccatcatccccacagcgcag

SEQ ID NO: 4210 - DNA, 201 bp, Homo sapiens
cattgactcggagctggtggaggagctgccggccgaaatcgagctgtggctggtgctggtggccgtgggtgcagggctgctgctgctggggctgatcatcmtcctgctgtggaagtgcggcttcttcaagcgagcccgcactcgcgccctgtatgaagctaagaggcagaaggcggagatgaagagccagccgtcagagac

SEQ ID NO: 4211 - DNA, 201 bp, Homo sapiens
atccatggagagaagctgggactgcctgggttggccaccttcggctattccctcagtgggcagatggatgtggatgagaacttctacccagaccttctagygggaagcctgtcagaccacattgtgctgctgcgggcccggcccgtcatcaacatcgtccacaagaccttggtgcccaggccagctgtgctggaccctgca

SEQ ID NO: 4212 - DNA, 201 bp, Homo sapiens
gcctctctccttggccacagactgaactcgcagggaatgcagcaggaaggaacaaagacaggcaaacggcaacgtagcctgggctcactgtgctggggcayggcgggatcctccacagagaggaggggaccaattctggacagacagatgttgggaggatacagaggagatgccacttctcactcaccactaccagccagc

SEQ ID NO: 4213 - DNA, 201 bp, Homo sapiens
tagggggtgccatctatgtcttcatgaaccaggcgggaacctccttccctgctcacccctcactccttcttcatggccccagtggctctgcctttggtttwtctgtggccagcattggtgacatcaaccaggatggatttcaggatattgctgtgggagctccgtttgaaggcttgggcaaagtgtacatctatcacagta

SEQ ID NO: 4214 - DNA, 201 bp, Homo sapiens
agggagcgacacttgaatgtagaataggcagggggccctgccccaccccatccagccagaccccacgctgaccatgcgtcaggggcctagaggtggagttyttagctatccttggctttcagagccagcctggctctgccccctcccccatgggctgtgtcctaaggcccatttgagaagctgaggctagttccagaaaac

SEQ ID NO: 4215 - DNA, 201 bp, Homo sapiens
cagagagaccctgcaagaccacggagggagcgacacttgaatgtagaataggcagggggccctgccccaccccatccagccagaccccacgctgaccatgygtcaggggcctagaggtggagttcttagctatccttggctttcagagccagcctggctctgccccctcccccatgggctgtgtcctaaggcccatttgag

SEQ ID NO: 4216 - DNA, 201 bp, Homo sapiens
agaataggcagggggccctgccccaccccatccagccagaccccacgctgaccatgcgtcaggggcctagaggtggagttcttagctatccttggctttcwgagccagcctggctctgccccctcccccatgggctgtgtcctaaggcccatttgagaagctgaggctagttccagaaaacctctcctgacccctgcctgt

SEQ ID NO: 4217 - DNA, 201 bp, Homo sapiens
aataggcagggggccctgccccaccccatccagccagaccccacgctgaccatgcgtcaggggcctagaggtggagttcttagctatccttggctttcagwgccagcctggctctgccccctcccccatgggctgtgtcctaaggcccatttgagaagctgaggctagttccagaaaacctctcctgacccctgcctgttg

SEQ ID NO: 4218 - DNA, 201 bp, Homo sapiens
acccaacagcaaaggaactagaaagaaggacccagaacggcttgctttcctgcatctctgtgaagcctctctccttggccacagactgaactcgcagggartgcagcaggaaggaacaaagacaggcaaacggcaacgtagcctgggctcactgtgctggggcacggcgggatcctccacagagaggaggggaccaattct

SEQ ID NO: 4219 - DNA, 201 bp, Homo sapiens
ggatgagaacttctacccagaccttctagtgggaagcctgtcagaccacattgtgctgctgcgggcccggcccgtcatcaacatcgtccacaagaccttgrtgcccaggccagctgtgctggaccctgcactttgcacggccacctcttgtgtgcaagtggagctgtgctttgcttacaaccagagtgccgggaaccccaa

SEQ ID NO: 4220 - DNA, 201 bp, Homo sapiens
catatgggcgcggtgttcttgctgagccaggaggcaggcggagacctgcggaggaggcaggtgctggagggctcgcaggtgggcgcctattttggcagcgycattgccctggcagacctgaacaatgatgggtggcaggacctcctggtgggcgccccctactacttcgagaggaaagaggaagtagggggtgccatctat

SEQ ID NO: 4221 - DNA, 201 bp, Homo sapiens
tgctcgtggactgtgctggtgcatcacggatggtgcatgggctcgccgtgtctcagcctctgccagcgccaaaacaagccaaagagcctcccaccagagcygggaggaaaaggcccctgcaatgtggtgacacctccccctttcacactggatccatcttgagccacagtcactggattgactttgctgtcaaaactactg

SEQ ID NO: 4222 - DNA, 201 bp, Homo sapiens
gtgacatcaaccaggatggatttcaggatattgctgtgggagctccgtttgaaggcttgggcaaagtgtacatctatcacagtagctctaaggggctcctyagacagccccagcaggtaatccatggagagaagctgggactgcctgggttggccaccttcggctattccctcagtgggcagatggatgtggatgagaact

SEQ ID NO: 4223 - DNA, 201 bp, Homo sapiens
agggctcgcaggtgggcgcctattttggcagcgccattgccctggcagacctgaacaatgatgggtggcaggacctcctggtgggcgccccctactacttygagaggaaagaggaagtagggggtgccatctatgtcttcatgaaccaggcgggaacctccttccctgctcacccctcactccttcttcatggccccagtg

SEQ ID NO: 4224 - DNA, 201 bp, Homo sapiens
tgtgccagctgggcaccagcggtggcttcacccagaacactgtgtacttcggcgcccccggtgcctacaactggaaaggaaacagctacatgattcagcgyaaggagtgggacttatctgagtatagttacaaggacccagaggaccaaggaaacctctatattgggtacacgatgcaggtaggcagcttcatcctgcacc

SEQ ID NO: 4225 - DNA, 201 bp, Homo sapiens
gtcctcagtgcgcccccccggggcctgccaagctaatgagaccatcttttgcgagctggggaaccccttcaaacggaaccagaggatggagctgctcatcrcctttgaggtcatcggggtgaccctgcacacaagggaccttcaggtgcagctgcagctctccacgtcgagtcaccaggacaacctgtggcccatgatcct

SEQ ID NO: 4226 - DNA, 201 bp, Homo sapiens
ggagctcgctgtgcccgatggctacaccaaccggactggtgctgtgtacctgtgcccactcactgcccacaaggatgactgtgagcggatgaacatcacartgaaaaatgaccctggccatcacattattgaggacatgtggcttggagtgactgtggccagccagggccctgcaggcagagttctggtctgtgcccaccg

SEQ ID NO: 4227 - DNA, 201 bp, Homo sapiens
aatgtggtgacacctccccctttcacactggatccatcttgagccacagtcactggattgactttgctgtcaaaactactgacagggagcagcccccgggycgctggctggtgggcccccaatgacacccatgccagagaggtggggatcctgcctaaggttgtctacgggggcacttggaggacctggcgtgctcagacc

SEQ ID NO: 4228 - DNA, 201 bp, Homo sapiens
ggtgacacctccccctttcacactggatccatcttgagccacagtcactggattgactttgctgtcaaaactactgacagggagcagcccccgggccgctrgctggtgggcccccaatgacacccatgccagagaggtggggatcctgcctaaggttgtctacgggggcacttggaggacctggcgtgctcagacccaaca

SEQ ID NO: 4229 - DNA, 201 bp, Homo sapiens
tgacacctccccctttcacactggatccatcttgagccacagtcactggattgactttgctgtcaaaactactgacagggagcagcccccgggccgctggytggtgggcccccaatgacacccatgccagagaggtggggatcctgcctaaggttgtctacgggggcacttggaggacctggcgtgctcagacccaacagc

SEQ ID NO: 4230 - DNA, 201 bp, Homo sapiens; identical to SEQ ID NO: 4204

SEQ ID NO: 4231 - DNA, 201 bp, Homo sapiens; identical to SEQ ID NO: 4205

SEQ ID NO: 4232 - DNA, 201 bp, Homo sapiens
ctcggagctggtggaggagctgccggccgaaatcgagctgtggctggtgctggtggccgtgggtgcagggctgctgctgctggggctgatcatcctcctgmtgtggaagtgtgacttctttaagcggacccgctattatcagatcatgcccaagtaccacgcagtgcggatccgggaggaggagcgctacccacctccagg

SEQ ID NO: 4233 - DNA, 201 bp, Homo sapiens; identical to SEQ ID NO: 4207

SEQ ID NO: 4234 - DNA, 201 bp, Homo sapiens
tggttctctgtggacattgactcggagctggtggaggagctgccggccgaaatcgagctgtggctggtgctggtggccgtgggtgcagggctgctgctgcwggggctgatcatcctcctgctgtggaagtgtgacttctttaagcggacccgctattatcagatcatgcccaagtaccacgcagtgcggatccgggaggag

SEQ ID NO: 4235 - DNA, 201 bp, Homo sapiens; identical to SEQ ID NO: 4209

SEQ ID NO: 4236 - DNA, 201 bp, Homo sapiens
cattgactcggagctggtggaggagctgccggccgaaatcgagctgtggctggtgctggtggccgtgggtgcagggctgctgctgctggggctgatcatcmtcctgctgtggaagtgtgacttctttaagcggacccgctattatcagatcatgcccaagtaccacgcagtgcggatccgggaggaggagcgctacccacc

SEQ ID NO: 4237 - DNA, 201 bp, Homo sapiens; identical to SEQ ID NO: 4211

SEQ ID NO: 4238 - DNA, 201 bp, Homo sapiens
gcctctctccttggccacagactgaactcgcagggaatgcagcaggaaggaacaaagacaggcaaacggcaacgtagcctgggctcactgtgctggggcayggcgggatcctccacagagaggaggggaccaattctggacagacagatgttgggaggatacagaggagataccctgcaagaccacggagggagcgacact

SEQ ID NO: 4239 - DNA, 201 bp, Homo sapiens; identical to SEQ ID NO: 4213

SEQ ID NO: 4240 - DNA, 201 bp, Homo sapiens; identical to SEQ ID NO: 4214

SEQ ID NO: 4241 - DNA, 201 bp, Homo sapiens
aggagataccctgcaagaccacggagggagcgacacttgaatgtagaataggcagggggccctgccccaccccatccagccagaccccacgctgaccatgygtcaggggcctagaggtggagttcttagctatccttggctttcagagccagcctggctctgccccctcccccatgggctgtgtcctaaggcccatttgag

SEQ ID NO: 4242 - DNA, 201 bp, Homo sapiens; identical to SEQ ID NO: 4216

SEQ ID NO: 4243 - DNA, 201 bp, Homo sapiens; identical to SEQ ID NO: 4217

SEQ ID NO: 4244 - DNA, 201 bp, Homo sapiens; identical to SEQ ID NO: 4218

SEQ ID NO: 4245 - DNA, 201 bp, Homo sapiens; identical to SEQ ID NO: 4219

SEQ ID NO: 4246 - DNA, 201 bp, Homo sapiens; identical to SEQ ID NO: 4220

SEQ ID NO: 4247 - DNA, 201 bp, Homo sapiens; identical to SEQ ID NO: 4221

SEQ ID NO: 4248 - DNA, 201 bp, Homo sapiens; identical to SEQ ID NO: 4222

SEQ ID NO: 4249 - DNA, 201 bp, Homo sapiens; identical to SEQ ID NO: 4223

SEQ ID NO: 4250 - DNA, 201 bp, Homo sapiens; identical to SEQ ID NO: 4224

SEQ ID NO: 4251 - DNA, 201 bp, Homo sapiens; identical to SEQ ID NO: 4225

SEQ ID NO: 4252 - DNA, 201 bp, Homo sapiens; identical to SEQ ID NO: 4226

SEQ ID NO: 4253 - DNA, 201 bp, Homo sapiens; identical to SEQ ID NO: 4227

SEQ ID NO: 4254 - DNA, 201 bp, Homo sapiens; identical to SEQ ID NO: 4228

SEQ ID NO: 4255 - DNA, 201 bp, Homo sapiens; identical to SEQ ID NO: 4229

SEQ ID NO: 4256 - DNA, 201 bp, Homo sapiens; identical to SEQ ID NO: 4204

SEQ ID NO: 4257 - DNA, 201 bp, Homo sapiens; identical to SEQ ID NO: 4205

SEQ ID NO: 4258 - DNA, 201 bp, Homo sapiens; identical to SEQ ID NO: 4232

SEQ ID NO: 4259 - DNA, 201 bp, Homo sapiens; identical to SEQ ID NO: 4207

SEQ ID NO: 4260 - DNA, 201 bp, Homo sapiens; identical to SEQ ID NO: 4234

SEQ ID NO: 4261 - DNA, 201 bp, Homo sapiens; identical to SEQ ID NO: 4209

SEQ ID NO: 4262 - DNA, 201 bp, Homo sapiens; identical to SEQ ID NO: 4236

SEQ ID NO: 4263 - DNA, 201 bp, Homo sapiens; identical to SEQ ID NO: 4211

SEQ ID NO: 4264 - DNA, 201 bp, Homo sapiens; identical to SEQ ID NO: 4212

SEQ ID NO: 4265 - DNA, 201 bp, Homo sapiens; identical to SEQ ID NO: 4213

SEQ ID NO: 4266 - DNA, 201 bp, Homo sapiens; identical to SEQ ID NO: 4214

SEQ ID NO: 4267 - DNA, 201 bp, Homo sapiens; identical to SEQ ID NO: 4215

SEQ ID NO: 4268 - DNA, 201 bp, Homo sapiens; identical to SEQ ID NO: 4216

SEQ ID NO: 4269 - DNA, 201 bp, Homo sapiens; identical to SEQ ID NO: 4217

SEQ ID NO: 4270 - DNA, 201 bp, Homo sapiens; identical to SEQ ID NO: 4218

SEQ ID NO: 4271 - DNA, 201 bp, Homo sapiens; identical to SEQ ID NO: 4219

SEQ ID NO: 4272 - DNA, 201 bp, Homo sapiens; identical to SEQ ID NO: 4220

SEQ ID NO: 4273 - DNA, 201 bp, Homo sapiens; identical to SEQ ID NO: 4221

SEQ ID NO: 4274 - DNA, 201 bp, Homo sapiens; identical to SEQ ID NO: 4222

SEQ ID NO: 4275 - DNA, 201 bp, Homo sapiens; identical to SEQ ID NO: 4223

SEQ ID NO: 4276 - DNA, 201 bp, Homo sapiens; identical to SEQ ID NO: 4224

SEQ ID NO: 4277 - DNA, 201 bp, Homo sapiens; identical to SEQ ID NO: 4225

SEQ ID NO: 4278 - DNA, 201 bp, Homo sapiens; identical to SEQ ID NO: 4226

SEQ ID NO: 4279 - DNA, 201 bp, Homo sapiens; identical to SEQ ID NO: 4227

SEQ ID NO: 4280 - DNA, 201 bp, Homo sapiens; identical to SEQ ID NO: 4228

SEQ ID NO: 4281 - DNA, 201 bp, Homo sapiens; identical to SEQ ID NO: 4229

SEQ ID NO: 4282 - DNA, 201 bp, Homo sapiens; identical to SEQ ID NO: 4204

SEQ ID NO: 4283 - DNA, 201 bp, Homo sapiens; identical to SEQ ID NO: 4205

SEQ ID NO: 4284 - DNA, 201 bp, Homo sapiens; identical to SEQ ID NO: 4206

SEQ ID NO: 4285 - DNA, 201 bp, Homo sapiens; identical to SEQ ID NO: 4207

SEQ ID NO: 4286 - DNA, 201 bp, Homo sapiens; identical to SEQ ID NO: 4208

SEQ ID NO: 4287 - DNA, 201 bp, Homo sapiens; identical to SEQ ID NO: 4209

SEQ ID NO: 4288 - DNA, 201 bp, Homo sapiens; identical to SEQ ID NO: 4210

SEQ ID NO: 4289 - DNA, 201 bp, Homo sapiens; identical to SEQ ID NO: 4211

SEQ ID NO: 4290 - DNA, 201 bp, Homo sapiens; identical to SEQ ID NO: 4238

SEQ ID NO: 4291 - DNA, 201 bp, Homo sapiens; identical to SEQ ID NO: 4213

SEQ ID NO: 4292 - DNA, 201 bp, Homo sapiens; identical to SEQ ID NO: 4214

SEQ ID NO: 4293 - DNA, 201 bp, Homo sapiens; identical to SEQ ID NO: 4241

SEQ ID NO: 4294 - DNA, 201 bp, Homo sapiens; identical to SEQ ID NO: 4216

SEQ ID NO: 4295 - DNA, 201 bp, Homo sapiens; identical to SEQ ID NO: 4217

SEQ ID NO: 4296 - DNA, 201 bp, Homo sapiens; identical to SEQ ID NO: 4218

SEQ ID NO: 4297 - DNA, 201 bp, Homo sapiens; identical to SEQ ID NO: 4219

SEQ ID NO: 4298 - DNA, 201 bp, Homo sapiens; identical to SEQ ID NO: 4220

SEQ ID NO: 4299 - DNA, 201 bp, Homo sapiens; identical to SEQ ID NO: 4221

SEQ ID NO: 4300 - DNA, 201 bp, Homo sapiens; identical to SEQ ID NO: 4222

SEQ ID NO: 4301 - DNA, 201 bp, Homo sapiens; identical to SEQ ID NO: 4223

SEQ ID NO: 4302 - DNA, 201 bp, Homo sapiens; identical to SEQ ID NO: 4224

SEQ ID NO: 4303 - DNA, 201 bp, Homo sapiens; identical to SEQ ID NO: 4225

SEQ ID NO: 4304 - DNA, 201 bp, Homo sapiens; identical to SEQ ID NO: 4226

SEQ ID NO: 4305 - DNA, 201 bp, Homo sapiens; identical to SEQ ID NO: 4227

SEQ ID NO: 4306 - DNA, 201 bp, Homo sapiens; identical to SEQ ID NO: 4228

SEQ ID NO: 4307 - DNA, 201 bp, Homo sapiens; identical to SEQ ID NO: 4229

SEQ ID NO: 4308 - DNA, 201 bp, Homo sapiens
cagcacctacttcacgacctatcctccattccattcaaataacgcggccaataggaaaatcctccgccctgagccaacgactcggcgtagctgagacagcmcgggaggcagatctgccctgtagagccttgcggttccactgctggcctccggattcccgggagcccccagcccgacaggacaaccttccttccccgcttc

SEQ ID NO: 4309 - DNA, 201 bp, Homo sapiens
gctaacaatgtgatataaagactttaaaagttacacattatgtggagccctatctttacaaaagtttcctactgtaaagtgcttttattttcagttttcayttgatagtactcaaccataattaaagttgcataagataattgctttacatttcacatacctatatttatctgagtgctgtctaaaactgttgtgctagcc

SEQ ID NO: 4310 - DNA, 201 bp, Homo sapiens
agcagatgaagacattttaggatatttagaagagttgcaaaagaaacaaaatctgctccatagtgaaaaacgggacaagaaatctccactaattgaatcamcagcaaatatggacaataatcagtcacagaagacctttaaaaacaaagagacgttgattattgaaccagagaaaaatgcatcccgtattgaatctctgga

SEQ ID NO: 4311 - DNA, 201 bp, Homo sapiens
actccagaacgtatgatgagacttaccagcgttataggccagtatcaacttcaagttcaaccactccatcctcttcactttctactatgagcagttcactstatgcttcaagtcaactaaacaggccaaatagtcttgtaggcataacttctgcttactccagaggaataacaaaagaaaatgaaagagagggagaaaaaa

SEQ ID NO: 4312 - DNA, 201 bp, Homo sapiens
agaaaacagagattcttcaagtttgcgaacaagtagttcatatacaaggagaaaatgggaagatgatcttaaaaaaaatagctcagttaatgaaggatcarcgtatcataaaagttgctcctttggtagaagacaagatgatttgattagttctagtgttccaagcaccacatcaacaccaacagttacctctgcagctgg

SEQ ID NO: 4313 - DNA, 114 bp, Homo sapiens
cagcattgtacatgcacatctgtaaatgcaatcttaattgccatatttatgcaatctgtgtaccaatttggacaaatgtttatatattttacataaagctstctgtatgcagaa

SEQ ID NO: 4314 - DNA, 201 bp, Homo sapiens; identical to SEQ ID NO: 4308

SEQ ID NO: 4315 - DNA, 201 bp, Homo sapiens; identical to SEQ ID NO: 4309

SEQ ID NO: 4316 - DNA, 201 bp, Homo sapiens; identical to SEQ ID NO: 4310

SEQ ID NO: 4317 - DNA, 201 bp, Homo sapiens; identical to SEQ ID NO: 4311

SEQ ID NO: 4318 - DNA, 201 bp, Homo sapiens; identical to SEQ ID NO: 4312

SEQ ID NO: 4319 - DNA, 112 bp, Homo sapiens
cagcattgtacatgcacatctgtaaatgcaatcttaattgccatatttatgcaatctgtgtaccaatttggacaaatgtttatatattttacataaagctstctgtatgcag

SEQ ID NO: 4320 - DNA, 201 bp, Homo sapiens; identical to SEQ ID NO: 4309

SEQ ID NO: 4321 - DNA, 201 bp, Homo sapiens; identical to SEQ ID NO: 4310

SEQ ID NO: 4322 - DNA, 201 bp, Homo sapiens
gtggccgtgctgggggcgggagggcttctgtggtaggaagggaggtccgctcggccgggtgcgccgccccagtgctctgtgggatactggaagtctcgagygtcggctccgggttcccagccctcctctggcccgcactcatagaaacattcacacaccccctgcctcccctctcttccctctccgcctcccccttccccc

SEQ ID NO: 4323 - DNA, 201 bp, Homo sapiens; identical to SEQ ID NO: 4311

SEQ ID NO: 4324 - DNA, 201 bp, Homo sapiens; identical to SEQ ID NO: 4312

SEQ ID NO: 4325 - DNA, 114 bp, Homo sapiens; identical to SEQ ID NO: 4313

SEQ ID NO: 4326 - DNA, 201 bp, Homo sapiens
atgaaaattcctcaacttaagagtatttggacagatagcacagaagtcgtggcttttagaccttagcttttccctaccggctttctgtttgcattaagctrgtatttgacacttgatgtctagggattcttacctcctttggccaatggtacttcacacccatatgctagtccttttatgctaaatgtgggttttcctgtt

SEQ ID NO: 4327 - DNA, 201 bp, Homo sapiens
acgtgtgctgtccacagtgcgacgtgctggcctatgagaaattcttccttctccttgctgaattcaactctgccatgaaccccatcatttactcctaccgygacaaagaaatgagcgccacctttaggcagatcctctgctgccagcgcagtgagaaccccaccggccccacagaaggctcagaccgctcggcttcctccc

SEQ ID NO: 4328 - DNA, 201 bp, Homo sapiens
gaaccccatcatttactcctaccgcgacaaagaaatgagcgccacctttaggcagatcctctgctgccagcgcagtgagaaccccaccggccccacagaargctcagaccgctcggcttcctccctcaaccacaccatcttggctggagttcacagcaatgaccactctgtggtttagaacggaaactgagatgaggaacc

SEQ ID NO: 4329 - DNA, 191 bp, Homo sapiens
tggattcaaacctatgaaaattcctcaacttaagagtatttggacagatagcacagaagtcgtggcttttagaccttagcttttccctacyggctttctgtttgcattaagctagtatttgacacttgatgtctagggattcttacctcctttggccaatggtacttcacacccatatgctagtcctttta

SEQ ID NO: 4330 - DNA, 201 bp, Homo sapiens
ggatgtcagtgcacggttagtgtttgagcagagggcagacttgtaaagtacctgtagtgaaaagaatgtggggacccgattagcagaaaggtgtttgcacrtactttatacaaaatacagaatactttatattggaagtgaaagaaatgaacgtggacttttacacatgtgcatatttttctggaggctatatggattatt

SEQ ID NO: 4331 - DNA, 201 bp, Homo sapiens
atgggttgagtgtgtcagtatgtggttggttactgtgtattcgccaggaatcaccccgataggctgccaccctattaggtgatacctgtttaatatgttgyccaggtagactagtagttgcatcagtttgctgtaacaagtaaccagtgaggtaacacagtggtgaagcaggtcaggggaggtcaggaggatgtctgagag

SEQ ID NO: 4332 - DNA, 201 bp, Homo sapiens
attacctaatggctaatctggctgctgcagacttctttgctgggttggcctacttctatctcatgttcaacacaggacccaatactcggagactgactgtyagcacatggctccttcgtcagggcctcattgacaccagcctgacggcatctgtggccaacttactggctattgcaatcgagaggcacattacggttttcc

SEQ ID NO: 4333 - DNA, 201 bp, Homo sapiens
taaaactgtctccatataattgattattaggatatattcccatgaaggattctttttttaaaaaaatgtgaaatatcatcttgtacttacacctttcatgmaaagggatttcctgcttttgtactgcatgggtggcagttgtgaggaaaagccagtcaaatgacctttttacaaaagaaatgcagtggtcacttcagttga

SEQ ID NO: 4334 - DNA, 201 bp, Homo sapiens
ataaagttgcagaaatttggtgtacataaaactgtctccatataattgattattaggatatattcccatgaaggattctttttttaaaaaaatgtgaaatrtcatcttgtacttacacctttcatgcaaagggatttcctgcttttgtactgcatgggtggcagttgtgaggaaaagccagtcaaatgacctttttacaaa

SEQ ID NO: 4335 - DNA, 201 bp, Homo sapiens
cttcctccctcaaccacaccatcttggctggagttcacagcaatgaccactctgtggtttagaacggaaactgagatgaggaaccagccgtcctctcttgkaggataaacagcctccccctacccaattgccagggcaaggtggggtgtgagagaggagaaaagtcaactcatgtacttaaacactaaccaatgacagtat

SEQ ID NO: 4336 - DNA, 201 bp, Homo sapiens
aacataattttaatggctatattatattccatttaatggatgcaactcagtttatttaaccattcccatgttgttaactatttaggttgtttctaattttsattattataaagttgcagaaatttggtgtacataaaactgtctccatataattgattattaggatatattcccatgaaggattctttttttaaaaaaatg

SEQ ID NO: 4337 - DNA, 201 bp, Homo sapiens
tatttaaaatacccaagtacattctaattaccagtatatcagaggaaaattttcgtagtctttgtaaaataatatactcatcatagaaaacttgaaaaatrcagaaatgtataaaaaagcaaaaatgattactgataatatcacaacccagaagtaaccacctttaaaaagcaacccccatgtatgcctatatgtgtattg

SEQ ID NO: 4338 - DNA, 201 bp, Homo sapiens
gtatttgttcctggaccccacaagacttgatatatattgaaaattagcttatgtgacaaccctcatcttgatccccatcccttctgaaagtaggaagttgsagctcttgcaatggaattcaagaacagactctggagtgtccatttagactacactaactagacttttaaaagattttgtgtggtttggtgcaagtcagaa

SEQ ID NO: 4339 - DNA, 201 bp, Homo sapiens
gctgccagcgcagtgagaaccccaccggccccacagaaggctcagaccgctcggcttcctccctcaaccacaccatcttggctggagttcacagcaatgaycactctgtggtttagaacggaaactgagatgaggaaccagccgtcctctcttggaggataaacagcctccccctacccaattgccagggcaaggtggggt

SEQ ID NO: 4340 - DNA, 201 bp, Homo sapiens
atctggctgctgcagacttctttgctgggttggcctacttctatctcatgttcaacacaggacccaatactcggagactgactgttagcacatggctcctkcgtcagggcctcattgacaccagcctgacggcatctgtggccaacttactggctattgcaatcgagaggcacattacggttttccgcatgcagctccaca

SEQ ID NO: 4341 - DNA, 201 bp, Homo sapiens
cctacaaccacagagctgtcatggctgccatctctacttccatccctgtaatttcacagccccagttcacagccatgaatgaaccacagtgcttctacaaygagtccattgccttcttttataaccgaagtggaaagcatcttgccacagaatggaacacagtcagcaagctggtgatgggacttggaatcactgtttgta

SEQ ID NO: 4342 - DNA, 201 bp, Homo sapiens
agtgcgacgtgctggcctatgagaaattcttccttctccttgctgaattcaactctgccatgaaccccatcatttactcctaccgcgacaaagaaatgagygccacctttaggcagatcctctgctgccagcgcagtgagaaccccaccggccccacagaaggctcagaccgctcggcttcctccctcaaccacaccatct

SEQ ID NO: 4343 - DNA, 201 bp, Homo sapiens; identical to SEQ ID NO: 4330

SEQ ID NO: 4344 - DNA, 201 bp, Homo sapiens; identical to SEQ ID NO: 4331

SEQ ID NO: 4345 - DNA, 201 bp, Homo sapiens; identical to SEQ ID NO: 4332

SEQ ID NO: 4346 - DNA, 201 bp, Homo sapiens; identical to SEQ ID NO: 4333

SEQ ID NO: 4347 - DNA, 201 bp, Homo sapiens; identical to SEQ ID NO: 4334

SEQ ID NO: 4348 - DNA, 201 bp, Homo sapiens; identical to SEQ ID NO: 4336

SEQ ID NO: 4349 - DNA, 201 bp, Homo sapiens; identical to SEQ ID NO: 4337

SEQ ID NO: 4350 - DNA, 201 bp, Homo sapiens; identical to SEQ ID NO: 4335

SEQ ID NO: 4351 - DNA, 201 bp, Homo sapiens; identical to SEQ ID NO: 4338

SEQ ID NO: 4352 - DNA, 201 bp, Homo sapiens; identical to SEQ ID NO: 4339

SEQ ID NO: 4353 - DNA, 201 bp, Homo sapiens; identical to SEQ ID NO: 4340

SEQ ID NO: 4354 - DNA, 201 bp, Homo sapiens; identical to SEQ ID NO: 4327

SEQ ID NO: 4355 - DNA, 201 bp, Homo sapiens; identical to SEQ ID NO: 4341

SEQ ID NO: 4356 - DNA, 201 bp, Homo sapiens; identical to SEQ ID NO: 4342

SEQ ID NO: 4357 - DNA, 201 bp, Homo sapiens; identical to SEQ ID NO: 4328

SEQ ID NO: 4358 - DNA, 201 bp, Homo sapiens; identical to SEQ ID NO: 4330

SEQ ID NO: 4359 - DNA, 201 bp, Homo sapiens; identical to SEQ ID NO: 4331

SEQ ID NO: 4360 - DNA, 201 bp, Homo sapiens; identical to SEQ ID NO: 4332

SEQ ID NO: 4361 - DNA, 201 bp, Homo sapiens; identical to SEQ ID NO: 4333

SEQ ID NO: 4362 - DNA, 201 bp, Homo sapiens; identical to SEQ ID NO: 4334

SEQ ID NO: 4363 - DNA, 201 bp, Homo sapiens; identical to SEQ ID NO: 4336

SEQ ID NO: 4364 - DNA, 201 bp, Homo sapiens; identical to SEQ ID NO: 4337

SEQ ID NO: 4365 - DNA, 201 bp, Homo sapiens; identical to SEQ ID NO: 4335

SEQ ID NO: 4366 - DNA, 201 bp, Homo sapiens; identical to SEQ ID NO: 4338

SEQ ID NO: 4367 - DNA, 201 bp, Homo sapiens; identical to SEQ ID NO: 4339

SEQ ID NO: 4368 - DNA, 201 bp, Homo sapiens; identical to SEQ ID NO: 4340

SEQ ID NO: 4369 - DNA, 201 bp, Homo sapiens; identical to SEQ ID NO: 4327

SEQ ID NO: 4370 - DNA, 201 bp, Homo sapiens; identical to SEQ ID NO: 4341

SEQ ID NO: 4371 - DNA, 201 bp, Homo sapiens; identical to SEQ ID NO: 4342

SEQ ID NO: 4372 - DNA, 201 bp, Homo sapiens; identical to SEQ ID NO: 4328

SEQ ID NO: 4373 - DNA, 201 bp, Homo sapiens; identical to SEQ ID NO: 4331

SEQ ID NO: 4374 - DNA, 201 bp, Homo sapiens; identical to SEQ ID NO: 4332

SEQ ID NO: 4375 - DNA, 201 bp, Homo sapiens; identical to SEQ ID NO: 4333

SEQ ID NO: 4376 - DNA, 201 bp, Homo sapiens; identical to SEQ ID NO: 4334

SEQ ID NO: 4377 - DNA, 201 bp, Homo sapiens; identical to SEQ ID NO: 4336

SEQ ID NO: 4378 - DNA, 201 bp, Homo sapiens; identical to SEQ ID NO: 4337

SEQ ID NO: 4379 - DNA, 201 bp, Homo sapiens; identical to SEQ ID NO: 4335

SEQ ID NO: 4380 - DNA, 201 bp, Homo sapiens; identical to SEQ ID NO: 4338

SEQ ID NO: 4381 - DNA, 201 bp, Homo sapiens; identical to SEQ ID NO: 4339

SEQ ID NO: 4382 - DNA, 201 bp, Homo sapiens; identical to SEQ ID NO: 4340

SEQ ID NO: 4383 - DNA, 201 bp, Homo sapiens; identical to SEQ ID NO: 4327

SEQ ID NO: 4384 - DNA, 201 bp, Homo sapiens; identical to SEQ ID NO: 4341

SEQ ID NO: 4385 - DNA, 201 bp, Homo sapiens; identical to SEQ ID NO: 4342

SEQ ID NO: 4386 - DNA, 201 bp, Homo sapiens; identical to SEQ ID NO: 4328

SEQ ID NO: 4387 - DNA, 201 bp, Homo sapiens; identical to SEQ ID NO: 4330

SEQ ID NO: 4388 - DNA, 201 bp, Homo sapiens; identical to SEQ ID NO: 4331

SEQ ID NO: 4389 - DNA, 201 bp, Homo sapiens; identical to SEQ ID NO: 4332

SEQ ID NO: 4390 - DNA, 201 bp, Homo sapiens; identical to SEQ ID NO: 4333

SEQ ID NO: 4391 - DNA, 201 bp, Homo sapiens; identical to SEQ ID NO: 4334

SEQ ID NO: 4392 - DNA, 201 bp, Homo sapiens; identical to SEQ ID NO: 4336

SEQ ID NO: 4393 - DNA, 201 bp, Homo sapiens; identical to SEQ ID NO: 4337

SEQ ID NO: 4394 - DNA, 201 bp, Homo sapiens; identical to SEQ ID NO: 4335

SEQ ID NO: 4395 - DNA, 201 bp, Homo sapiens; identical to SEQ ID NO: 4338

SEQ ID NO: 4396 - DNA, 201 bp, Homo sapiens; identical to SEQ ID NO: 4339

SEQ ID NO: 4397 - DNA, 201 bp, Homo sapiens; identical to SEQ ID NO: 4340

SEQ ID NO: 4398 - DNA, 201 bp, Homo sapiens; identical to SEQ ID NO: 4327

SEQ ID NO: 4399 - DNA, 201 bp, Homo sapiens; identical to SEQ ID NO: 4341

SEQ ID NO: 4400 - DNA, 201 bp, Homo sapiens; identical to SEQ ID NO: 4342

SEQ ID NO: 4401 - DNA, 201 bp, Homo sapiens; identical to SEQ ID NO: 4328

SEQ ID NO: 4402 - DNA, 201 bp, Homo sapiens
tcatggctaccagcacctgaaagcttcctcgacatctgttaataaagccgtaggcccttgtctaagtgcaaccgcctagactttctttcagatacatgtcyacatgtccatttttcaggttctctaagttggagtggagtctgggaagggttgtgaatgaggcttctgggctatgggtgaggttccaatggcaggttagag

SEQ ID NO: 4403 - DNA, 201 bp, Homo sapiens
cctttccttaaaggccatccttaaaaccagaccctcatggctaccagcacctgaaagcttcctcgacatctgttaataaagccgtaggcccttgtctaagygcaaccgcctagactttctttcagatacatgtccacatgtccatttttcaggttctctaagttggagtggagtctgggaagggttgtgaatgaggcttct

SEQ ID NO: 4404 - DNA, 201 bp, Homo sapiens
attaacccttggtgaatttttgaaactggacagagaaagagccaagaacaaaattgcaaaggaaaccaacaataagaagaaagaatttgaggaaactgcgragaaagtgcgccgtgccatcgagcagctggctgccatggattgaggcctctggccggagctgcctggtcccagagtggctgcaccacttccagggtttat

SEQ ID NO: 4405 - DNA, 201 bp, Homo sapiens
agcctgtgctgtgggcagggctgagctggagccgcccctctcagcccgcctgccacggcctttccttaaaggccatccttaaaaccagaccctcatggctrccagcacctgaaagcttcctcgacatctgttaataaagccgtaggcccttgtctaagtgcaaccgcctagactttctttcagatacatgtccacatgtcc

SEQ ID NO: 4406 - DNA, 201 bp, Homo sapiens
tctgtcacacctgtgcctcctcagaggacatgtttttttgtttttttttttttggtagatgcatgacttgtgtgtgatgagagaatggagacagagtcccyggctcctctactgtttaacaacatggctttcttattttgtttgaattgttaattcacagaatagcacaaactacaattaaaactaagcacaaagccattc

SEQ ID NO: 4407 - DNA, 201 bp, Homo sapiens
tggaaaaaaatggttttgtcttcaactcctttgcatgccaggcggtgatgtggatctcggcttctgtgagcctgtgctgtgggcagggctgagctggagcmgcccctctcagcccgcctgccacggcctttccttaaaggccatccttaaaaccagaccctcatggctaccagcacctgaaagcttcctcgacatctgtta

SEQ ID NO: 4408 - DNA, 201 bp, Homo sapiens
ctctggccggagctgcctggtcccagagtggctgcaccacttccagggtttattccctggtgccaccagccttcctgtgggccccttagcaatgtcttagraaaggagatcaacattttcaaattagatgtttcaactgtgctcttgttttgtcttgaaagtggcaccagaggtgcttctgcctgtgcagcgggtgctgct

SEQ ID NO: 4409 - DNA, 201 bp, Homo sapiens
ttgaggctgtcacagtcctgagtgtggacttggcaggtgcctgttgaatctgagctgcaggttccttatctgtcacacctgtgcctcctcagaggacatgtttttttgtttttttttttttggtagatgcatgacttgtgtgtgatgagagaatggagacagagtccctggctcctctactgtttaacaacatggctttct

SEQ ID NO: 4410 - DNA, 201 bp, Homo sapiens
tgtcacagtcctgagtgtggacttggcaggtgcctgttgaatctgagctgcaggttccttatctgtcacacctgtgcctcctcagaggacatgtttttttgtttttttttttttggtagatgcatgacttgtgtgtgatgagagaatggagacagagtccctggctcctctactgtttaacaacatggctttcttattttg

SEQ ID NO: 4411 - DNA, 144 bp, Homo sapiens
gacatgccccgcggcgcgccattaaccgccagatttgaatcgcsggacccgttggcagaggtggcggcggcggcatgggtgccccgacgttgccccctgcctggcagccctttctcaaggaccaccgcatctctacattcaaga

SEQ ID NO: 4412 - DNA, 201 bp, Homo sapiens
agggtttattccctggtgccaccagccttcctgtgggccccttagcaatgtcttaggaaaggagatcaacattttcaaattagatgtttcaactgtgctcytgttttgtcttgaaagtggcaccagaggtgcttctgcctgtgcagcgggtgctgctggtaacagtggctgcttctctctctctctctcttttttgggggc

SEQ ID NO: 4413 - DNA, 201 bp, Homo sapiens; identical to SEQ ID NO: 4402

SEQ ID NO: 4414 - DNA, 201 bp, Homo sapiens; identical to SEQ ID NO: 4403

SEQ ID NO: 4415 - DNA, 201 bp, Homo sapiens; identical to SEQ ID NO: 4404

SEQ ID NO: 4416 - DNA, 201 bp, Homo sapiens; identical to SEQ ID NO: 4405

SEQ ID NO: 4417 - DNA, 201 bp, Homo sapiens
cctcctcagaggacagtttttttgttgttgtgtttttttgtttttttttttttggtagatgcatgacttgtgtgtgatgagagaatggagacagagtcccyggctcctctactgtttaacaacatggctttcttattttgtttgaattgttaattcacagaatagcacaaactacaattaaaactaagcacaaagccattc

SEQ ID NO: 4418 - DNA, 201 bp, Homo sapiens; identical to SEQ ID NO: 4407

SEQ ID NO: 4419 - DNA, 201 bp, Homo sapiens; identical to SEQ ID NO: 4408

SEQ ID NO: 4420 - DNA, 201 bp, Homo sapiens
ctgtcacagtcctgagtgtggacttggcaggtgcctgttgaatctgagctgcaggttccttatctgtcacacctgtgcctcctcagaggacagtttttttgttgttgtgtttttttgtttttttttttttggtagatgcatgacttgtgtgtgatgagagaatggagacagagtccctggctcctctactgtttaacaaca

SEQ ID NO: 4421 - DNA, 201 bp, Homo sapiens
tcctgagtgtggacttggcaggtgcctgttgaatctgagctgcaggttccttatctgtcacacctgtgcctcctcagaggacagtttttttgttgttgtgtttttttgtttttttttttttggtagatgcatgacttgtgtgtgatgagagaatggagacagagtccctggctcctctactgtttaacaacatggctttct

SEQ ID NO: 4422 - DNA, 201 bp, Homo sapiens
tgtggacttggcaggtgcctgttgaatctgagctgcaggttccttatctgtcacacctgtgcctcctcagaggacagtttttttgttgttgtgtttttttgtttttttttttttggtagatgcatgacttgtgtgtgatgagagaatggagacagagtccctggctcctctactgtttaacaacatggctttcttattttg

SEQ ID NO: 4423 - DNA, 144 bp, Homo sapiens; identical to SEQ ID NO: 4411

SEQ ID NO: 4424 - DNA, 201 bp, Homo sapiens; identical to SEQ ID NO: 4412

SEQ ID NO: 4425 - DNA, 201 bp, Homo sapiens; identical to SEQ ID NO: 4402

SEQ ID NO: 4426 - DNA, 201 bp, Homo sapiens; identical to SEQ ID NO: 4403

SEQ ID NO: 4427 - DNA, 201 bp, Homo sapiens
agtgtttcttctgcttcaaggagctggaaggctgggagccagatgacgaccccatgcaaaggaaaccaacaataagaagaaagaatttgaggaaactgcgragaaagtgcgccgtgccatcgagcagctggctgccatggattgaggcctctggccggagctgcctggtcccagagtggctgcaccacttccagggtttat

SEQ ID NO: 4428 - DNA, 201 bp, Homo sapiens; identical to SEQ ID NO: 4405

SEQ ID NO: 4429 - DNA, 201 bp, Homo sapiens; identical to SEQ ID NO: 4406

SEQ ID NO: 4430 - DNA, 201 bp, Homo sapiens; identical to SEQ ID NO: 4407

SEQ ID NO: 4431 - DNA, 201 bp, Homo sapiens; identical to SEQ ID NO: 4408

SEQ ID NO: 4432 - DNA, 201 bp, Homo sapiens; identical to SEQ ID NO: 4409

SEQ ID NO: 4433 - DNA, 201 bp, Homo sapiens; identical to SEQ ID NO: 4410

SEQ ID NO: 4434 - DNA, 144 bp, Homo sapiens; identical to SEQ ID NO: 4411

SEQ ID NO: 4435 - DNA, 201 bp, Homo sapiens; identical to SEQ ID NO: 4412

SEQ ID NO: 4436 - DNA, 144 bp, Homo sapiens; identical to SEQ ID NO: 4411

SEQ ID NO: 4437 - DNA, 201 bp, Homo sapiens; identical to SEQ ID NO: 4402

SEQ ID NO: 4438 - DNA, 201 bp, Homo sapiens; identical to SEQ ID NO: 4403

SEQ ID NO: 4439 - DNA, 201 bp, Homo sapiens; identical to SEQ ID NO: 4427

SEQ ID NO: 4440 - DNA, 201 bp, Homo sapiens; identical to SEQ ID NO: 4405

SEQ ID NO: 4441 - DNA, 201 bp, Homo sapiens; identical to SEQ ID NO: 4417

SEQ ID NO: 4442 - DNA, 201 bp, Homo sapiens; identical to SEQ ID NO: 4407

SEQ ID NO: 4443 - DNA, 201 bp, Homo sapiens; identical to SEQ ID NO: 4408

SEQ ID NO: 4444 - DNA, 201 bp, Homo sapiens; identical to SEQ ID NO: 4420

SEQ ID NO: 4445 - DNA, 201 bp, Homo sapiens; identical to SEQ ID NO: 4421

SEQ ID NO: 4446 - DNA, 201 bp, Homo sapiens; identical to SEQ ID NO: 4422

SEQ ID NO: 4447 - DNA, 144 bp, Homo sapiens; identical to SEQ ID NO: 4411

SEQ ID NO: 4448 - DNA, 201 bp, Homo sapiens; identical to SEQ ID NO: 4412

SEQ ID NO: 4449 - DNA, 201 bp, Homo sapiens; identical to SEQ ID NO: 4402

SEQ ID NO: 4450 - DNA, 201 bp, Homo sapiens; identical to SEQ ID NO: 4403

SEQ ID NO: 4451 - DNA, 201 bp, Homo sapiens; identical to SEQ ID NO: 4404

SEQ ID NO: 4452 - DNA, 201 bp, Homo sapiens; identical to SEQ ID NO: 4405

SEQ ID NO: 4453 - DNA, 201 bp, Homo sapiens; identical to SEQ ID NO: 4406

SEQ ID NO: 4454 - DNA, 201 bp, Homo sapiens; identical to SEQ ID NO: 4407

SEQ ID NO: 4455 - DNA, 201 bp, Homo sapiens; identical to SEQ ID NO: 4408

SEQ ID NO: 4456 - DNA, 201 bp, Homo sapiens; identical to SEQ ID NO: 4409

SEQ ID NO: 4457 - DNA, 201 bp, Homo sapiens; identical to SEQ ID NO: 4410

SEQ ID NO: 4458 - DNA, 144 bp, Homo sapiens; identical to SEQ ID NO: 4411

SEQ ID NO: 4459 - DNA, 201 bp, Homo sapiens; identical to SEQ ID NO: 4412

SEQ ID NO: 4460 - DNA, 201 bp, Homo sapiens; identical to SEQ ID NO: 4402

SEQ ID NO: 4461 - DNA, 201 bp, Homo sapiens; identical to SEQ ID NO: 4403

SEQ ID NO: 4462 - DNA, 201 bp, Homo sapiens; identical to SEQ ID NO: 4404

SEQ ID NO: 4463 - DNA, 201 bp, Homo sapiens; identical to SEQ ID NO: 4405

SEQ ID NO: 4464 - DNA, 201 bp, Homo sapiens; identical to SEQ ID NO: 4417

SEQ ID NO: 4465 - DNA, 201 bp, Homo sapiens; identical to SEQ ID NO: 4407

SEQ ID NO: 4466 - DNA, 201 bp, Homo sapiens; identical to SEQ ID NO: 4408

SEQ ID NO: 4467 - DNA, 201 bp, Homo sapiens; identical to SEQ ID NO: 4420

SEQ ID NO: 4468 - DNA, 201 bp, Homo sapiens; identical to SEQ ID NO: 4421

SEQ ID NO: 4469 - DNA, 201 bp, Homo sapiens; identical to SEQ ID NO: 4422

SEQ ID NO: 4470 - DNA, 144 bp, Homo sapiens; identical to SEQ ID NO: 4411

SEQ ID NO: 4471 - DNA, 201 bp, Homo sapiens; identical to SEQ ID NO: 4412

SEQ ID NO: 4472 - DNA, 201 bp, Homo sapiens
cgagggccggaactgtgagacgcacaaggatgaccagctgatctgtgtgaacgagaacggcggctgtgagcagtactgcagtgaccacacgggcaccaagygctcctgtcggtgccacgaggggtactctctgctggcagacggggtgtcctgcacacccacagttgaatatccatgtggaaaaatacctattctagaaaa

SEQ ID NO: 4473 - DNA, 201 bp, Homo sapiens
gcgctgctccgcctgcaccagcccgtggtcctcactgaccatgtggtgcccctctgcctgcccgaacggacgttctctgagaggacgctggccttcgtgcrcttctcattggtcagcggctggggccagctgctggaccgtggcgccacggccctggagctcatggtcctcaacgtgccccggctgatgacccaggactgc

SEQ ID NO: 4474 - DNA, 201 bp, Homo sapiens
cagcacgtacgtcccgggcaccaccaaccacgacatcgcgctgctccgcctgcaccagcccgtggtcctcactgaccatgtggtgcccctctgcctgcccraacggacgttctctgagaggacgctggccttcgtgcgcttctcattggtcagcggctggggccagctgctggaccgtggcgccacggccctggagctcat

SEQ ID NO: 4475 - DNA, 201 bp, Homo sapiens
acgttctctgagaggacgctggccttcgtgcgcttctcattggtcagcggctggggccagctgctggaccgtggcgccacggccctggagctcatggtccycaacgtgccccggctgatgacccaggactgcctgcagcagtcacggaaggtgggagactccccaaatatcacggagtacatgttctgtgccggctactcg

SEQ ID NO: 4476 - DNA, 201 bp, Homo sapiens
aggcccacatgccacccactaccggggcacgtggtacctgacgggcatcgtcagctggggccagggctgcgcaaccgtgggccactttggggtgtacaccrgggtctcccagtacatcgagtggctgcaaaagctcatgcgctcagagccacgcccaggagtcctcctgcgagccccatttccctagcccagcagccctgg

SEQ ID NO: 4477 - DNA, 201 bp, Homo sapiens
tgagaggacgctggccttcgtgcgcttctcattggtcagcggctggggccagctgctggaccgtggcgccacggccctggagctcatggtcctcaacgtgmcccggctgatgacccaggactgcctgcagcagtcacggaaggtgggagactccccaaatatcacggagtacatgttctgtgccggctactcggatggcag

SEQ ID NO: 4478 - DNA, 201 bp, Homo sapiens
gagaggacgctggccttcgtgcgcttctcattggtcagcggctggggccagctgctggaccgtggcgccacggccctggagctcatggtcctcaacgtgcsccggctgatgacccaggactgcctgcagcagtcacggaaggtgggagactccccaaatatcacggagtacatgttctgtgccggctactcggatggcagc

SEQ ID NO: 4479 - DNA, 201 bp, Homo sapiens
ggcccgggagatcttcaaggacgcggagaggacgaagctgttctggatttcttacagtgatggggaccagtgtgcctcaagtccatgccagaatgggggcycctgcaaggaccagctccagtcctatatctgcttctgcctccctgccttcgagggccggaactgtgagacgcacaaggatgaccagctgatctgtgtgaa

SEQ ID NO: 4480 - DNA, 201 bp, Homo sapiens
cgggagatcttcaaggacgcggagaggacgaagctgttctggatttcttacagtgatggggaccagtgtgcctcaagtccatgccagaatgggggctcctkcaaggaccagctccagtcctatatctgcttctgcctccctgccttcgagggccggaactgtgagacgcacaaggatgaccagctgatctgtgtgaacgag

SEQ ID NO: 4481 - DNA, 201 bp, Homo sapiens
cgcttctcattggtcagcggctggggccagctgctggaccgtggcgccacggccctggagctcatggtcctcaacgtgccccggctgatgacccaggactkcctgcagcagtcacggaaggtgggagactccccaaatatcacggagtacatgttctgtgccggctactcggatggcagcaaggactcctgcaagggggac

SEQ ID NO: 4482 - DNA, 201 bp, Homo sapiens
ctccgcggcccactgtttcgacaaaatcaagaactggaggaacctgatcgcggtgctgggcgagcacgacctcagcgagcacgacggggatgagcagagcyggcgggtggcgcaggtcatcatccccagcacgtacgtcccgggcaccaccaaccacgacatcgcgctgctccgcctgcaccagcccgtggtcctcactga

SEQ ID NO: 4483 - DNA, 201 bp, Homo sapiens
cacgacctcagcgagcacgacggggatgagcagagccggcgggtggcgcaggtcatcatccccagcacgtacgtcccgggcaccaccaaccacgacatcgygctgctccgcctgcaccagcccgtggtcctcactgaccatgtggtgcccctctgcctgcccgaacggacgttctctgagaggacgctggccttcgtgcgc

SEQ ID NO: 4484 - DNA, 201 bp, Homo sapiens
ctggagctcatggtcctcaacgtgccccggctgatgacccaggactgcctgcagcagtcacggaaggtgggagactccccaaatatcacggagtacatgtyctgtgccggctactcggatggcagcaaggactcctgcaagggggacagtggaggcccacatgccacccactaccggggcacgtggtacctgacgggcatc

SEQ ID NO: 4485 - DNA, 201 bp, Homo sapiens
agacgcacaaggatgaccagctgatctgtgtgaacgagaacggcggctgtgagcagtactgcagtgaccacacgggcaccaagcgctcctgtcggtgccaygaggggtactctctgctggcagacggggtgtcctgcacacccacagttgaatatccatgtggaaaaatacctattctagaaaaaagaaatgccagcaaac

SEQ ID NO: 4486 - DNA, 201 bp, Homo sapiens
gggcgagcacgacctcagcgagcacgacggggatgagcagagccggcgggtggcgcaggtcatcatccccagcacgtacgtcccgggcaccaccaaccacvacatcgcgctgctccgcctgcaccagcccgtggtcctcactgaccatgtggtgcccctctgcctgcccgaacggacgttctctgagaggacgctggcctt

SEQ ID NO: 4487 - DNA, 201 bp, Homo sapiens
cggaaggtgggagactccccaaatatcacggagtacatgttctgtgccggctactcggatggcagcaaggactcctgcaagggggacagtggaggcccacrtgccacccactaccggggcacgtggtacctgacgggcatcgtcagctggggccagggctgcgcaaccgtgggccactttggggtgtacaccagggtctcc

SEQ ID NO: 4488 - DNA, 201 bp, Homo sapiens
ggaaggtgggagactccccaaatatcacggagtacatgttctgtgccggctactcggatggcagcaaggactcctgcaagggggacagtggaggcccacakgccacccactaccggggcacgtggtacctgacgggcatcgtcagctggggccagggctgcgcaaccgtgggccactttggggtgtacaccagggtctccc

SEQ ID NO: 4489 - DNA, 201 bp, Homo sapiens
gcacgacctcagcgagcacgacggggatgagcagagccggcgggtggcgcaggtcatcatccccagcacgtacgtcccgggcaccaccaaccacgacatcrcgctgctccgcctgcaccagcccgtggtcctcactgaccatgtggtgcccctctgcctgcccgaacggacgttctctgagaggacgctggccttcgtgcg

SEQ ID NO: 4490 - DNA, 201 bp, Homo sapiens
ggagctcatggtcctcaacgtgccccggctgatgacccaggactgcctgcagcagtcacggaaggtgggagactccccaaatatcacggagtacatgttcbgtgccggctactcggatggcagcaaggactcctgcaagggggacagtggaggcccacatgccacccactaccggggcacgtggtacctgacgggcatcgt

SEQ ID NO: 4491 - DNA, 201 bp, Homo sapiens
cagcgagcacgacggggatgagcagagccggcgggtggcgcaggtcatcatccccagcacgtacgtcccgggcaccaccaaccacgacatcgcgctgctcygcctgcaccagcccgtggtcctcactgaccatgtggtgcccctctgcctgcccgaacggacgttctctgagaggacgctggccttcgtgcgcttctcatt

SEQ ID NO: 4492 - DNA, 201 bp, Homo sapiens
catggtcctcaacgtgccccggctgatgacccaggactgcctgcagcagtcacggaaggtgggagactccccaaatatcacggagtacatgttctgtgccrgctactcggatggcagcaaggactcctgcaagggggacagtggaggcccacatgccacccactaccggggcacgtggtacctgacgggcatcgtcagctg

SEQ ID NO: 4493 - DNA, 201 bp, Homo sapiens
tctgtgtgaacgagaacggcggctgtgagcagtactgcagtgaccacacgggcaccaagcgctcctgtcggtgccacgaggggtactctctgctggcagayggggtgtcctgcacacccacagttgaatatccatgtggaaaaatacctattctagaaaaaagaaatgccagcaaaccccaaggccgaattgtggggggca

SEQ ID NO: 4494 - DNA, 201 bp, Homo sapiens
gggagatcttcaaggacgcggagaggacgaagctgttctggatttcttacagtgatggggaccagtgtgcctcaagtccatgccagaatgggggctcctgmaaggaccagctccagtcctatatctgcttctgcctccctgccttcgagggccggaactgtgagacgcacaaggatgaccagctgatctgtgtgaacgaga

SEQ ID NO: 4495 - DNA, 201 bp, Homo sapiens
aaggacgcggagaggacgaagctgttctggatttcttacagtgatggggaccagtgtgcctcaagtccatgccagaatgggggctcctgcaaggaccagcyccagtcctatatctgcttctgcctccctgccttcgagggccggaactgtgagacgcacaaggatgaccagctgatctgtgtgaacgagaacggcggctgt

SEQ ID NO: 4496 - DNA, 201 bp, Homo sapiens
gagaggacgaagctgttctggatttcttacagtgatggggaccagtgtgcctcaagtccatgccagaatgggggctcctgcaaggaccagctccagtcctrtatctgcttctgcctccctgccttcgagggccggaactgtgagacgcacaaggatgaccagctgatctgtgtgaacgagaacggcggctgtgagcagtac

SEQ ID NO: 4497 - DNA, 201 bp, Homo sapiens
atctgcttctgcctccctgccttcgagggccggaactgtgagacgcacaaggatgaccagctgatctgtgtgaacgagaacggcggctgtgagcagtactrcagtgaccacacgggcaccaagcgctcctgtcggtgccacgaggggtactctctgctggcagacggggtgtcctgcacacccacagttgaatatccatgt

SEQ ID NO: 4498 - DNA, 201 bp, Homo sapiens
tctctgctggcagacggggtgtcctgcacacccacagttgaatatccatgtggaaaaatacctattctagaaaaaagaaatgccagcaaaccccaaggccraattgtggggggcaaggtgtgccccaaaggggagtgtccatggcaggtcctgttgttggtgaatggagctcagttgtgtggggggaccctgatcaacacc

SEQ ID NO: 4499 - DNA, 201 bp, Homo sapiens
ggtgtgccccaaaggggagtgtccatggcaggtcctgttgttggtgaatggagctcagttgtgtggggggaccctgatcaacaccatctgggtggtctccrcggcccactgtttcgacaaaatcaagaactggaggaacctgatcgcggtgctgggcgagcacgacctcagcgagcacgacggggatgagcagagccggcg

SEQ ID NO: 4500 - DNA, 201 bp, Homo sapiens
gaggacgctggccttcgtgcgcttctcattggtcagcggctggggccagctgctggaccgtggcgccacggccctggagctcatggtcctcaacgtgcccyggctgatgacccaggactgcctgcagcagtcacggaaggtgggagactccccaaatatcacggagtacatgttctgtgccggctactcggatggcagcaa

SEQ ID NO: 4501 - DNA, 201 bp, Homo sapiens
ggactgcctgcagcagtcacggaaggtgggagactccccaaatatcacggagtacatgttctgtgccggctactcggatggcagcaaggactcctgcaagrgggacagtggaggcccacatgccacccactaccggggcacgtggtacctgacgggcatcgtcagctggggccagggctgcgcaaccgtgggccactttgg

SEQ ID NO: 4502 - DNA, 201 bp, Homo sapiens
aacggacgttctctgagaggacgctggccttcgtgcgcttctcattggtcagcggctggggccagctgctggaccgtggcgccacggccctggagctcatrgtcctcaacgtgccccggctgatgacccaggactgcctgcagcagtcacggaaggtgggagactccccaaatatcacggagtacatgttctgtgccggct

SEQ ID NO: 4503 - DNA, 201 bp, Homo sapiens
atcacggagtacatgttctgtgccggctactcggatggcagcaaggactcctgcaagggggacagtggaggcccacatgccacccactaccggggcacgtrgtacctgacgggcatcgtcagctggggccagggctgcgcaaccgtgggccactttggggtgtacaccagggtctcccagtacatcgagtggctgcaaaag

SEQ ID NO: 4504 - DNA, 201 bp, Homo sapiens
tcctatatctgcttctgcctccctgccttcgagggccggaactgtgagacgcacaaggatgaccagctgatctgtgtgaacgagaacggcggctgtgagcrgtactgcagtgaccacacgggcaccaagcgctcctgtcggtgccacgaggggtactctctgctggcagacggggtgtcctgcacacccacagttgaatat

SEQ ID NO: 4505 - DNA, 201 bp, Homo sapiens
ggatgagcagagccggcgggtggcgcaggtcatcatccccagcacgtacgtcccgggcaccaccaaccacgacatcgcgctgctccgcctgcaccagcccrtggtcctcactgaccatgtggtgcccctctgcctgcccgaacggacgttctctgagaggacgctggccttcgtgcgcttctcattggtcagcggctgggg

SEQ ID NO: 4506 - DNA, 201 bp, Homo sapiens
ctctgcctgcccgaacggacgttctctgagaggacgctggccttcgtgcgcttctcattggtcagcggctggggccagctgctggaccgtggcgccacggycctggagctcatggtcctcaacgtgccccggctgatgacccaggactgcctgcagcagtcacggaaggtgggagactccccaaatatcacggagtacatg

SEQ ID NO: 4507 - DNA, 201 bp, Homo sapiens
tacatgttctgtgccggctactcggatggcagcaaggactcctgcaagggggacagtggaggcccacatgccacccactaccggggcacgtggtacctgaygggcatcgtcagctggggccagggctgcgcaaccgtgggccactttggggtgtacaccagggtctcccagtacatcgagtggctgcaaaagctcatgcgc

SEQ ID NO: 4508 - DNA, 201 bp, Homo sapiens
gatggggaccagtgtgcctcaagtccatgccagaatgggggctcctgcaaggaccagctccagtcctatatctgcttctgcctccctgccttcgagggccrgaactgtgagacgcacaaggatgaccagctgatctgtgtgaacgagaacggcggctgtgagcagtactgcagtgaccacacgggcaccaagcgctcctgt

SEQ ID NO: 4509 - DNA, 201 bp, Homo sapiens
aggacgctggccttcgtgcgcttctcattggtcagcggctggggccagctgctggaccgtggcgccacggccctggagctcatggtcctcaacgtgccccrgctgatgacccaggactgcctgcagcagtcacggaaggtgggagactccccaaatatcacggagtacatgttctgtgccggctactcggatggcagcaag

SEQ ID NO: 4510 - DNA, 201 bp, Homo sapiens
tgatggggaccagtgtgcctcaagtccatgccagaatgggggctcctgcaaggaccagctccagtcctatatctgcttctgcctccctgccttcgagggcyggaactgtgagacgcacaaggatgaccagctgatctgtgtgaacgagaacggcggctgtgagcagtactgcagtgaccacacgggcaccaagcgctcctg

SEQ ID NO: 4511 - DNA, 201 bp, Homo sapiens
gtactgcagtgaccacacgggcaccaagcgctcctgtcggtgccacgaggggtactctctgctggcagacggggtgtcctgcacacccacagttgaatatmcatgtggaaaaatacctattctagaaaaaagaaatgccagcaaaccccaaggccgaattgtggggggcaaggtgtgccccaaaggggagtgtccatggca

SEQ ID NO: 4512 - DNA, 201 bp, Homo sapiens
accaaccacgacatcgcgctgctccgcctgcaccagcccgtggtcctcactgaccatgtggtgcccctctgcctgcccgaacggacgttctctgagaggaygctggccttcgtgcgcttctcattggtcagcggctggggccagctgctggaccgtggcgccacggccctggagctcatggtcctcaacgtgccccggctg

SEQ ID NO: 4513 - DNA, 201 bp, Homo sapiens
aggaacctgatcgcggtgctgggcgagcacgacctcagcgagcacgacggggatgagcagagccggcgggtggcgcaggtcatcatccccagcacgtacgwcccgggcaccaccaaccacgacatcgcgctgctccgcctgcaccagcccgtggtcctcactgaccatgtggtgcccctctgcctgcccgaacggacgttc

SEQ ID NO: 4514 - DNA, 201 bp, Homo sapiens
ctgcagtgaccacacgggcaccaagcgctcctgtcggtgccacgaggggtactctctgctggcagacggggtgtcctgcacacccacagttgaatatccaygtggaaaaatacctattctagaaaaaagaaatgccagcaaaccccaaggccgaattgtggggggcaaggtgtgccccaaaggggagtgtccatggcaggt

SEQ ID NO: 4515 - DNA, 201 bp, Homo sapiens
ctgcctgcagcagtcacggaaggtgggagactccccaaatatcacggagtacatgttctgtgccggctactcggatggcagcaaggactcctgcaaggggvacagtggaggcccacatgccacccactaccggggcacgtggtacctgacgggcatcgtcagctggggccagggctgcgcaaccgtgggccactttggggt

SEQ ID NO: 4516 - DNA, 201 bp, Homo sapiens
tcgcggtgctgggcgagcacgacctcagcgagcacgacggggatgagcagagccggcgggtggcgcaggtcatcatccccagcacgtacgtcccgggcacyaccaaccacgacatcgcgctgctccgcctgcaccagcccgtggtcctcactgaccatgtggtgcccctctgcctgcccgaacggacgttctctgagagga

SEQ ID NO: 4517 - DNA, 201 bp, Homo sapiens
tgaccacacgggcaccaagcgctcctgtcggtgccacgaggggtactctctgctggcagacggggtgtcctgcacacccacagttgaatatccatgtggaraaatacctattctagaaaaaagaaatgccagcaaaccccaaggccgaattgtggggggcaaggtgtgccccaaaggggagtgtccatggcaggtcctgtt

SEQ ID NO: 4518 - DNA, 201 bp, Homo sapiens
ttggtgaatggagctcagttgtgtggggggaccctgatcaacaccatctgggtggtctccgcggcccactgtttcgacaaaatcaagaactggaggaaccygatcgcggtgctgggcgagcacgacctcagcgagcacgacggggatgagcagagccggcgggtggcgcaggtcatcatccccagcacgtacgtcccgggc

SEQ ID NO: 4519 - DNA, 201 bp, Homo sapiens
tcatggtcctcaacgtgccccggctgatgacccaggactgcctgcagcagtcacggaaggtgggagactccccaaatatcacggagtacatgttctgtgcyggctactcggatggcagcaaggactcctgcaagggggacagtggaggcccacatgccacccactaccggggcacgtggtacctgacgggcatcgtcagct

SEQ ID NO: 4520 - DNA, 201 bp, Homo sapiens
gccggctactcggatggcagcaaggactcctgcaagggggacagtggaggcccacatgccacccactaccggggcacgtggtacctgacgggcatcgtcakctggggccagggctgcgcaaccgtgggccactttggggtgtacaccagggtctcccagtacatcgagtggctgcaaaagctcatgcgctcagagccacgc

SEQ ID NO: 4521 - DNA, 201 bp, Homo sapiens
cgtggtcctcactgaccatgtggtgcccctctgcctgcccgaacggacgttctctgagaggacgctggccttcgtgcgcttctcattggtcagcggctggrgccagctgctggaccgtggcgccacggccctggagctcatggtcctcaacgtgccccggctgatgacccaggactgcctgcagcagtcacggaaggtggg

SEQ ID NO: 4522 - DNA, 201 bp, Homo sapiens
ctctctgctggcagacggggtgtcctgcacacccacagttgaatatccatgtggaaaaatacctattctagaaaaaagaaatgccagcaaaccccaaggcygaattgtggggggcaaggtgtgccccaaaggggagtgtccatggcaggtcctgttgttggtgaatggagctcagttgtgtggggggaccctgatcaacac

SEQ ID NO: 4523 - DNA, 201 bp, Homo sapiens
cgaacggacgttctctgagaggacgctggccttcgtgcgcttctcattggtcagcggctggggccagctgctggaccgtggcgccacggccctggagctcrtggtcctcaacgtgccccggctgatgacccaggactgcctgcagcagtcacggaaggtgggagactccccaaatatcacggagtacatgttctgtgccgg

SEQ ID NO: 4524 - DNA, 201 bp, Homo sapiens
accaaatcccatatattcttctgcagttaatggggtagaggagggcatgggagggagggagaggtggggagggagacagagacagaaacagagagagacaragacagagagagactgagggagagactctgaggacatggagagagactcaaagagactccaagattcaaagagactaatagagacacagagatggaatag

SEQ ID NO: 4525 - DNA, 201 bp, Homo sapiens
atggtcctcaacgtgccccggctgatgacccaggactgcctgcagcagtcacggaaggtgggagactccccaaatatcacggagtacatgttctgtgccgrctactcggatggcagcaaggactcctgcaagggggacagtggaggcccacatgccacccactaccggggcacgtggtacctgacgggcatcgtcagctgg

SEQ ID NO: 4526 - DNA, 201 bp, Homo sapiens
gactgcctgcagcagtcacggaaggtgggagactccccaaatatcacggagtacatgttctgtgccggctactcggatggcagcaaggactcctgcaaggrggacagtggaggcccacatgccacccactaccggggcacgtggtacctgacgggcatcgtcagctggggccagggctgcgcaaccgtgggccactttggg

SEQ ID NO: 4527 - DNA, 201 bp, Homo sapiens
ggccctggagctcatggtcctcaacgtgccccggctgatgacccaggactgcctgcagcagtcacggaaggtgggagactccccaaatatcacggagtacrtgttctgtgccggctactcggatggcagcaaggactcctgcaagggggacagtggaggcccacatgccacccactaccggggcacgtggtacctgacggg

SEQ ID NO: 4528 - DNA, 201 bp, Homo sapiens
tccccaaatatcacggagtacatgttctgtgccggctactcggatggcagcaaggactcctgcaagggggacagtggaggcccacatgccacccactaccrgggcacgtggtacctgacgggcatcgtcagctggggccagggctgcgcaaccgtgggccactttggggtgtacaccagggtctcccagtacatcgagtgg

SEQ ID NO: 4529 - DNA, 201 bp, Homo sapiens
cgcgctgctccgcctgcaccagcccgtggtcctcactgaccatgtggtgcccctctgcctgcccgaacggacgttctctgagaggacgctggccttcgtgygcttctcattggtcagcggctggggccagctgctggaccgtggcgccacggccctggagctcatggtcctcaacgtgccccggctgatgacccaggactg

SEQ ID NO: 4530 - DNA, 201 bp, Homo sapiens
cctgcaccagcccgtggtcctcactgaccatgtggtgcccctctgcctgcccgaacggacgttctctgagaggacgctggccttcgtgcgcttctcattgktcagcggctggggccagctgctggaccgtggcgccacggccctggagctcatggtcctcaacgtgccccggctgatgacccaggactgcctgcagcagtc

SEQ ID NO: 4531 - DNA, 201 bp, Homo sapiens
gaatggagctcagttgtgtggggggaccctgatcaacaccatctgggtggtctccgcggcccactgtttcgacaaaatcaagaactggaggaacctgatcrcggtgctgggcgagcacgacctcagcgagcacgacggggatgagcagagccggcgggtggcgcaggtcatcatccccagcacgtacgtcccgggcaccac

SEQ ID NO: 4532 - DNA, 201 bp, Homo sapiens
ccttctgcttgggcttcagggctgcctggctgcaggcggggtcgctaaggcctcaggaggagaaacacgggacatgccgtggaagccggggcctcacagartcttcgtaacccaggaggaagcccacggcgtcctgcaccggcgccggcgcgccaacgcgttcctggaggagctgcggccgggctccctggagagggagtg

SEQ ID NO: 4533 - DNA, 161 bp, Homo sapiens
agtcccatggggaatgtcaacaggcaggggcagcactgcagagatttcatcatggtctccyaggccctcaggctcctctgccttctgcttgggcttcagggctgcctggctgcaggcggggtcgctaaggcctcaggaggagaaacacgggacatgccgtg

SEQ ID NO: 4534 - DNA, 154 bp, Homo sapiens
agtcccatggggaatgtcaacaggcaggggcagcactgcagagatttcatcatsgtctcccaggccctcaggctcctctgccttctgcttgggcttcagggctgcctggctgcaggcggggtcgctaaggcctcaggaggagaaacacgggaca

SEQ ID NO: 4535 - DNA, 201 bp, Homo sapiens
accagcccgtggtcctcactgaccatgtggtgcccctctgcctgcccgaacggacgttctctgagaggacgctggccttcgtgcgcttctcattggtcagsggctggggccagctgctggaccgtggcgccacggccctggagctcatggtcctcaacgtgccccggctgatgacccaggactgcctgcagcagtcacgga

SEQ ID NO: 4536 - DNA, 201 bp, Homo sapiens
agaaacacgggacatgccgtggaagccggggcctcacagagtcttcgtaacccaggaggaagcccacggcgtcctgcaccggcgccggcgcgccaacgcgytcctggaggagctgcggccgggctccctggagagggagtgcaaggaggagcagtgctccttcgaggaggcccgggagatcttcaaggacgcggagaggac

SEQ ID NO: 4537 - DNA, 201 bp, Homo sapiens
gggcctcacagagtcttcgtaacccaggaggaagcccacggcgtcctgcaccggcgccggcgcgccaacgcgttcctggaggagctgcggccgggctcccwggagagggagtgcaaggaggagcagtgctccttcgaggaggcccgggagatcttcaaggacgcggagaggacgaagctgttctggatttcttacagtgat

SEQ ID NO: 4538 - DNA, 201 bp, Homo sapiens
gctactcggatggcagcaaggactcctgcaagggggacagtggaggcccacatgccacccactaccggggcacgtggtacctgacgggcatcgtcagctgvggccagggctgcgcaaccgtgggccactttggggtgtacaccagggtctcccagtacatcgagtggctgcaaaagctcatgcgctcagagccacgcccag

SEQ ID NO: 4539 - DNA, 201 bp, Homo sapiens
cgtaacccaggaggaagcccacggcgtcctgcaccggcgccggcgcgccaacgcgttcctggaggagctgcggccgggctccctggagagggagtgcaagsaggagcagtgctccttcgaggaggcccgggagatcttcaaggacgcggagaggacgaagctgttctggatttcttacagtgatggggaccagtgtgcctc

SEQ ID NO: 4540 - DNA, 201 bp, Homo sapiens
ggggacagtggaggcccacatgccacccactaccggggcacgtggtacctgacgggcatcgtcagctggggccagggctgcgcaaccgtgggccactttgrggtgtacaccagggtctcccagtacatcgagtggctgcaaaagctcatgcgctcagagccacgcccaggagtcctcctgcgagccccatttccctagccc

SEQ ID NO: 4541 - DNA, 201 bp, Homo sapiens
gcggcccactgtttcgacaaaatcaagaactggaggaacctgatcgcggtgctgggcgagcacgacctcagcgagcacgacggggatgagcagagccggcrggtggcgcaggtcatcatccccagcacgtacgtcccgggcaccaccaaccacgacatcgcgctgctccgcctgcaccagcccgtggtcctcactgaccat

SEQ ID NO: 4542 - DNA, 201 bp, Homo sapiens
ggaagcccacggcgtcctgcaccggcgccggcgcgccaacgcgttcctggaggagctgcggccgggctccctggagagggagtgcaaggaggagcagtgcyccttcgaggaggcccgggagatcttcaaggacgcggagaggacgaagctgttctggatttcttacagtgatggggaccagtgtgcctcaagtccatgcca

SEQ ID NO: 4543 - DNA, 201 bp, Homo sapiens
agcgagcacgacggggatgagcagagccggcgggtggcgcaggtcatcatccccagcacgtacgtcccgggcaccaccaaccacgacatcgcgctgctccrcctgcaccagcccgtggtcctcactgaccatgtggtgcccctctgcctgcccgaacggacgttctctgagaggacgctggccttcgtgcgcttctcattg

SEQ ID NO: 4544 - DNA, 201 bp, Homo sapiens
aaaccccaaggccgaattgtggggggcaaggtgtgccccaaaggggagtgtccatggcaggtcctgttgttggtgaatggagctcagttgtgtggggggamcctgatcaacaccatctgggtggtctccgcggcccactgtttcgacaaaatcaagaactggaggaacctgatcgcggtgctgggcgagcacgacctcagc

SEQ ID NO: 4545 - DNA, 201 bp, Homo sapiens
aaaggggagtgtccatggcaggtcctgttgttggtgaatggagctcagttgtgtggggggaccctgatcaacaccatctgggtggtctccgcggcccactrtttcgacaaaatcaagaactggaggaacctgatcgcggtgctgggcgagcacgacctcagcgagcacgacggggatgagcagagccggcgggtggcgcag

SEQ ID NO: 4546 - DNA, 201 bp, Homo sapiens
cagagtcttcgtaacccaggaggaagcccacggcgtcctgcaccggcgccggcgcgccaacgcgttcctggaggagctgcggccgggctccctggagaggragtgcaaggaggagcagtgctccttcgaggaggcccgggagatcttcaaggacgcggagaggacgaagctgttctggatttcttacagtgatggggacca

SEQ ID NO: 4547 - DNA, 201 bp, Homo sapiens; identical to SEQ ID NO: 4472

SEQ ID NO: 4548 - DNA, 201 bp, Homo sapiens; identical to SEQ ID NO: 4473

SEQ ID NO: 4549 - DNA, 201 bp, Homo sapiens; identical to SEQ ID NO: 4474

SEQ ID NO: 4550 - DNA, 201 bp, Homo sapiens; identical to SEQ ID NO: 4475

SEQ ID NO: 4551 - DNA, 201 bp, Homo sapiens; identical to SEQ ID NO: 4476

SEQ ID NO: 4552 - DNA, 201 bp, Homo sapiens; identical to SEQ ID NO: 4477

SEQ ID NO: 4553 - DNA, 201 bp, Homo sapiens; identical to SEQ ID NO: 4478

SEQ ID NO: 4554 - DNA, 201 bp, Homo sapiens; identical to SEQ ID NO: 4479

SEQ ID NO: 4555 - DNA, 201 bp, Homo sapiens; identical to SEQ ID NO: 4480

SEQ ID NO: 4556 - DNA, 201 bp, Homo sapiens; identical to SEQ ID NO: 4481

SEQ ID NO: 4557 - DNA, 201 bp, Homo sapiens; identical to SEQ ID NO: 4482

SEQ ID NO: 4558 - DNA, 201 bp, Homo sapiens; identical to SEQ ID NO: 4483

SEQ ID NO: 4559 - DNA, 201 bp, Homo sapiens; identical to SEQ ID NO: 4484

SEQ ID NO: 4560 - DNA, 201 bp, Homo sapiens; identical to SEQ ID NO: 4485

SEQ ID NO: 4561 - DNA, 201 bp, Homo sapiens; identical to SEQ ID NO: 4486

SEQ ID NO: 4562 - DNA, 201 bp, Homo sapiens; identical to SEQ ID NO: 4487

SEQ ID NO: 4563 - DNA, 201 bp, Homo sapiens; identical to SEQ ID NO: 4488

SEQ ID NO: 4564 - DNA, 201 bp, Homo sapiens; identical to SEQ ID NO: 4489

SEQ ID NO: 4565 - DNA, 201 bp, Homo sapiens; identical to SEQ ID NO: 4490

SEQ ID NO: 4566 - DNA, 201 bp, Homo sapiens; identical to SEQ ID NO: 4491

SEQ ID NO: 4567 - DNA, 201 bp, Homo sapiens; identical to SEQ ID NO: 4492

SEQ ID NO: 4568 - DNA, 201 bp, Homo sapiens; identical to SEQ ID NO: 4493

SEQ ID NO: 4569 - DNA, 201 bp, Homo sapiens; identical to SEQ ID NO: 4494

SEQ ID NO: 4570 - DNA, 201 bp, Homo sapiens; identical to SEQ ID NO: 4495

SEQ ID NO: 4571 - DNA, 201 bp, Homo sapiens; identical to SEQ ID NO: 4496

SEQ ID NO: 4572 - DNA, 201 bp, Homo sapiens; identical to SEQ ID NO: 4497

SEQ ID NO: 4573 - DNA, 201 bp, Homo sapiens; identical to SEQ ID NO: 4498

SEQ ID NO: 4574 - DNA, 201 bp, Homo sapiens; identical to SEQ ID NO: 4499

SEQ ID NO: 4575 - DNA, 201 bp, Homo sapiens; identical to SEQ ID NO: 4500

SEQ ID NO: 4576 - DNA, 201 bp, Homo sapiens; identical to SEQ ID NO: 4501

SEQ ID NO: 4577 - DNA, 201 bp, Homo sapiens; identical to SEQ ID NO: 4502

SEQ ID NO: 4578 - DNA, 201 bp, Homo sapiens; identical to SEQ ID NO: 4503

SEQ ID NO: 4579 - DNA, 201 bp, Homo sapiens; identical to SEQ ID NO: 4504

SEQ ID NO: 4580 - DNA, 201 bp, Homo sapiens; identical to SEQ ID NO: 4505

SEQ ID NO: 4581 - DNA, 201 bp, Homo sapiens; identical to SEQ ID NO: 4506

SEQ ID NO: 4582 - DNA, 201 bp, Homo sapiens; identical to SEQ ID NO: 4507

SEQ ID NO: 4583 - DNA, 201 bp, Homo sapiens; identical to SEQ ID NO: 4508

SEQ ID NO: 4584 - DNA, 201 bp, Homo sapiens; identical to SEQ ID NO: 4509

SEQ ID NO: 4585 - DNA, 201 bp, Homo sapiens; identical to SEQ ID NO: 4510

SEQ ID NO: 4586 - DNA, 201 bp, Homo sapiens; identical to SEQ ID NO: 4511

SEQ ID NO: 4587 - DNA, 201 bp, Homo sapiens; identical to SEQ ID NO: 4512

SEQ ID NO: 4588 - DNA, 201 bp, Homo sapiens; identical to SEQ ID NO: 4513

SEQ ID NO: 4589 - DNA, 201 bp, Homo sapiens; identical to SEQ ID NO: 4514

SEQ ID NO: 4590 - DNA, 201 bp, Homo sapiens; identical to SEQ ID NO: 4515

SEQ ID NO: 4591 - DNA, 201 bp, Homo sapiens; identical to SEQ ID NO: 4516

SEQ ID NO: 4592 - DNA, 201 bp, Homo sapiens; identical to SEQ ID NO: 4517

SEQ ID NO: 4593 - DNA, 201 bp, Homo sapiens; identical to SEQ ID NO: 4518

SEQ ID NO: 4594 - DNA, 201 bp, Homo sapiens; identical to SEQ ID NO: 4519

SEQ ID NO: 4595 - DNA, 201 bp, Homo sapiens; identical to SEQ ID NO: 4520

SEQ ID NO: 4596 - DNA, 201 bp, Homo sapiens; identical to SEQ ID NO: 4521

SEQ ID NO: 4597 - DNA, 201 bp, Homo sapiens; identical to SEQ ID NO: 4522

SEQ ID NO: 4598 - DNA, 201 bp, Homo sapiens; identical to SEQ ID NO: 4523

SEQ ID NO: 4599 - DNA, 201 bp, Homo sapiens; identical to SEQ ID NO: 4524

SEQ ID NO: 4600 - DNA, 201 bp, Homo sapiens; identical to SEQ ID NO: 4525

SEQ ID NO: 4601 - DNA, 201 bp, Homo sapiens; identical to SEQ ID NO: 4526

SEQ ID NO: 4602 - DNA, 201 bp, Homo sapiens; identical to SEQ ID NO: 4527

SEQ ID NO: 4603 - DNA, 201 bp, Homo sapiens; identical to SEQ ID NO: 4528

SEQ ID NO: 4604 - DNA, 201 bp, Homo sapiens; identical to SEQ ID NO: 4529

SEQ ID NO: 4605 - DNA, 201 bp, Homo sapiens; identical to SEQ ID NO: 4530

SEQ ID NO: 4606 - DNA, 201 bp, Homo sapiens; identical to SEQ ID NO: 4531

SEQ ID NO: 4607 - DNA, 201 bp, Homo sapiens; identical to SEQ ID NO: 4532

SEQ ID NO: 4608 - DNA, 161 bp, Homo sapiens; identical to SEQ ID NO: 4533

SEQ ID NO: 4609 - DNA, 154 bp, Homo sapiens; identical to SEQ ID NO: 4534

SEQ ID NO: 4610 - DNA, 201 bp, Homo sapiens; identical to SEQ ID NO: 4535

SEQ ID NO: 4611 - DNA, 201 bp, Homo sapiens; identical to SEQ ID NO: 4536

SEQ ID NO: 4612 - DNA, 201 bp, Homo sapiens; identical to SEQ ID NO: 4537

SEQ ID NO: 4613 - DNA, 201 bp, Homo sapiens; identical to SEQ ID NO: 4538

SEQ ID NO: 4614 - DNA, 201 bp, Homo sapiens; identical to SEQ ID NO: 4539

SEQ ID NO: 4615 - DNA, 201 bp, Homo sapiens; identical to SEQ ID NO: 4540

SEQ ID NO: 4616 - DNA, 201 bp, Homo sapiens; identical to SEQ ID NO: 4541

SEQ ID NO: 4617 - DNA, 201 bp, Homo sapiens; identical to SEQ ID NO: 4542

SEQ ID NO: 4618 - DNA, 201 bp, Homo sapiens; identical to SEQ ID NO: 4543

SEQ ID NO: 4619 - DNA, 201 bp, Homo sapiens; identical to SEQ ID NO: 4544

SEQ ID NO: 4620 - DNA, 201 bp, Homo sapiens; identical to SEQ ID NO: 4545

SEQ ID NO: 4621 - DNA, 201 bp, Homo sapiens; identical to SEQ ID NO: 4546

SEQ ID NO: 4622 - DNA, 201 bp, Homo sapiens; identical to SEQ ID NO: 4472

SEQ ID NO: 4623 - DNA, 201 bp, Homo sapiens; identical to SEQ ID NO: 4473

SEQ ID NO: 4624 - DNA, 201 bp, Homo sapiens; identical to SEQ ID NO: 4474

SEQ ID NO: 4625 - DNA, 201 bp, Homo sapiens; identical to SEQ ID NO: 4475

SEQ ID NO: 4626 - DNA, 201 bp, Homo sapiens; identical to SEQ ID NO: 4476

SEQ ID NO: 4627 - DNA, 201 bp, Homo sapiens; identical to SEQ ID NO: 4477

SEQ ID NO: 4628 - DNA, 201 bp, Homo sapiens; identical to SEQ ID NO: 4478

SEQ ID NO: 4629 - DNA, 201 bp, Homo sapiens; identical to SEQ ID NO: 4479

SEQ ID NO: 4630 - DNA, 201 bp, Homo sapiens; identical to SEQ ID NO: 4480

SEQ ID NO: 4631 - DNA, 201 bp, Homo sapiens; identical to SEQ ID NO: 4481

SEQ ID NO: 4632 - DNA, 201 bp, Homo sapiens; identical to SEQ ID NO: 4482

SEQ ID NO: 4633 - DNA, 201 bp, Homo sapiens; identical to SEQ ID NO: 4483

SEQ ID NO: 4634 - DNA, 201 bp, Homo sapiens; identical to SEQ ID NO: 4484

SEQ ID NO: 4635 - DNA, 201 bp, Homo sapiens; identical to SEQ ID NO: 4485

SEQ ID NO: 4636 - DNA, 201 bp, Homo sapiens; identical to SEQ ID NO: 4486

SEQ ID NO: 4637 - DNA, 201 bp, Homo sapiens; identical to SEQ ID NO: 4487

SEQ ID NO: 4638 - DNA, 201 bp, Homo sapiens; identical to SEQ ID NO: 4488

SEQ ID NO: 4639 - DNA, 201 bp, Homo sapiens; identical to SEQ ID NO: 4489

SEQ ID NO: 4640 - DNA, 201 bp, Homo sapiens; identical to SEQ ID NO: 4490

SEQ ID NO: 4641 - DNA, 201 bp, Homo sapiens; identical to SEQ ID NO: 4491

SEQ ID NO: 4642 - DNA, 201 bp, Homo sapiens; identical to SEQ ID NO: 4492

SEQ ID NO: 4643 - DNA, 201 bp, Homo sapiens; identical to SEQ ID NO: 4493

SEQ ID NO: 4644 - DNA, 201 bp, Homo sapiens; identical to SEQ ID NO: 4494

SEQ ID NO: 4645 - DNA, 201 bp, Homo sapiens; identical to SEQ ID NO: 4495

SEQ ID NO: 4646 - DNA, 201 bp, Homo sapiens; identical to SEQ ID NO: 4496

SEQ ID NO: 4647 - DNA, 201 bp, Homo sapiens; identical to SEQ ID NO: 4497

SEQ ID NO: 4648 - DNA, 201 bp, Homo sapiens; identical to SEQ ID NO: 4498

SEQ ID NO: 4649 - DNA, 201 bp, Homo sapiens; identical to SEQ ID NO: 4499

SEQ ID NO: 4650 - DNA, 201 bp, Homo sapiens; identical to SEQ ID NO: 4500

SEQ ID NO: 4651 - DNA, 201 bp, Homo sapiens; identical to SEQ ID NO: 4501

SEQ ID NO: 4652 - DNA, 201 bp, Homo sapiens; identical to SEQ ID NO: 4502

SEQ ID NO: 4653 - DNA, 201 bp, Homo sapiens; identical to SEQ ID NO: 4503

SEQ ID NO: 4654 - DNA, 201 bp, Homo sapiens; identical to SEQ ID NO: 4504

SEQ ID NO: 4655 - DNA, 201 bp, Homo sapiens; identical to SEQ ID NO: 4505

SEQ ID NO: 4656 - DNA, 201 bp, Homo sapiens; identical to SEQ ID NO: 4506

SEQ ID NO: 4657 - DNA, 201 bp, Homo sapiens; identical to SEQ ID NO: 4507

SEQ ID NO: 4658 - DNA, 201 bp, Homo sapiens; identical to SEQ ID NO: 4508

SEQ ID NO: 4659 - DNA, 201 bp, Homo sapiens; identical to SEQ ID NO: 4509

SEQ ID NO: 4660 - DNA, 201 bp, Homo sapiens; identical to SEQ ID NO: 4510

SEQ ID NO: 4661 - DNA, 201 bp, Homo sapiens; identical to SEQ ID NO: 4511

SEQ ID NO: 4662 - DNA, 201 bp, Homo sapiens; identical to SEQ ID NO: 4512

SEQ ID NO: 4663 - DNA, 201 bp, Homo sapiens; identical to SEQ ID NO: 4513

SEQ ID NO: 4664 - DNA, 201 bp, Homo sapiens; identical to SEQ ID NO: 4514

SEQ ID NO: 4665 - DNA, 201 bp, Homo sapiens; identical to SEQ ID NO: 4515

SEQ ID NO: 4666 - DNA, 201 bp, Homo sapiens; identical to SEQ ID NO: 4516

SEQ ID NO: 4667 - DNA, 201 bp, Homo sapiens; identical to SEQ ID NO: 4517

SEQ ID NO: 4668 - DNA, 201 bp, Homo sapiens; identical to SEQ ID NO: 4518

SEQ ID NO: 4669 - DNA, 201 bp, Homo sapiens; identical to SEQ ID NO: 4519

SEQ ID NO: 4670 - DNA, 201 bp, Homo sapiens; identical to SEQ ID NO: 4520

SEQ ID NO: 4671 - DNA, 201 bp, Homo sapiens; identical to SEQ ID NO: 4521

SEQ ID NO: 4672 - DNA, 201 bp, Homo sapiens; identical to SEQ ID NO: 4522

SEQ ID NO: 4673 - DNA, 201 bp, Homo sapiens; identical to SEQ ID NO: 4523

SEQ ID NO: 4674 - DNA, 201 bp, Homo sapiens; identical to SEQ ID NO: 4524

SEQ ID NO: 4675 - DNA, 201 bp, Homo sapiens; identical to SEQ ID NO: 4525

SEQ ID NO: 4676 - DNA, 201 bp, Homo sapiens; identical to SEQ ID NO: 4526

SEQ ID NO: 4677 - DNA, 201 bp, Homo sapiens; identical to SEQ ID NO: 4527

SEQ ID NO: 4678 - DNA, 201 bp, Homo sapiens; identical to SEQ ID NO: 4528

SEQ ID NO: 4679 - DNA, 201 bp, Homo sapiens; identical to SEQ ID NO: 4529

SEQ ID NO: 4680 - DNA, 201 bp, Homo sapiens; identical to SEQ ID NO: 4530

SEQ ID NO: 4681 - DNA, 201 bp, Homo sapiens; identical to SEQ ID NO: 4531

SEQ ID NO: 4682 - DNA, 161 bp, Homo sapiens
agtcccatggggaatgtcaacaggcaggggcagcactgcagagatttcatcatggtctccyaggccctcaggctcctctgccttctgcttgggcttcagggctgcctggctgcagtcttcgtaacccaggaggaagcccacggcgtcctgcaccggcgccg

SEQ ID NO: 4683 - DNA, 154 bp, Homo sapiens
agtcccatggggaatgtcaacaggcaggggcagcactgcagagatttcatcatsgtctcccaggccctcaggctcctctgccttctgcttgggcttcagggctgcctggctgcagtcttcgtaacccaggaggaagcccacggcgtcctgcacc

SEQ ID NO: 4684 - DNA, 201 bp, Homo sapiens; identical to SEQ ID NO: 4535

SEQ ID NO: 4685 - DNA, 201 bp, Homo sapiens
cctctgccttctgcttgggcttcagggctgcctggctgcagtcttcgtaacccaggaggaagcccacggcgtcctgcaccggcgccggcgcgccaacgcgytcctggaggagctgcggccgggctccctggagagggagtgcaaggaggagcagtgctccttcgaggaggcccgggagatcttcaaggacgcggagaggac

SEQ ID NO: 4686 - DNA, 201 bp, Homo sapiens
tgcctggctgcagtcttcgtaacccaggaggaagcccacggcgtcctgcaccggcgccggcgcgccaacgcgttcctggaggagctgcggccgggctcccwggagagggagtgcaaggaggagcagtgctccttcgaggaggcccgggagatcttcaaggacgcggagaggacgaagctgttctggatttcttacagtgat

SEQ ID NO: 4687 - DNA, 201 bp, Homo sapiens; identical to SEQ ID NO: 4538

SEQ ID NO: 4688 - DNA, 201 bp, Homo sapiens; identical to SEQ ID NO: 4539

SEQ ID NO: 4689 - DNA, 201 bp, Homo sapiens; identical to SEQ ID NO: 4540

SEQ ID NO: 4690 - DNA, 201 bp, Homo sapiens; identical to SEQ ID NO: 4541

SEQ ID NO: 4691 - DNA, 201 bp, Homo sapiens; identical to SEQ ID NO: 4542

SEQ ID NO: 4692 - DNA, 201 bp, Homo sapiens; identical to SEQ ID NO: 4543

SEQ ID NO: 4693 - DNA, 201 bp, Homo sapiens; identical to SEQ ID NO: 4544

SEQ ID NO: 4694 - DNA, 201 bp, Homo sapiens; identical to SEQ ID NO: 4545

SEQ ID NO: 4695 - DNA, 201 bp, Homo sapiens
tgcagtcttcgtaacccaggaggaagcccacggcgtcctgcaccggcgccggcgcgccaacgcgttcctggaggagctgcggccgggctccctggagaggragtgcaaggaggagcagtgctccttcgaggaggcccgggagatcttcaaggacgcggagaggacgaagctgttctggatttcttacagtgatggggacca

SEQ ID NO: 4696 - DNA, 201 bp, Homo sapiens; identical to SEQ ID NO: 4472

SEQ ID NO: 4697 - DNA, 201 bp, Homo sapiens; identical to SEQ ID NO: 4473

SEQ ID NO: 4698 - DNA, 201 bp, Homo sapiens; identical to SEQ ID NO: 4474

SEQ ID NO: 4699 - DNA, 201 bp, Homo sapiens; identical to SEQ ID NO: 4475

SEQ ID NO: 4700 - DNA, 201 bp, Homo sapiens; identical to SEQ ID NO: 4476

SEQ ID NO: 4701 - DNA, 201 bp, Homo sapiens; identical to SEQ ID NO: 4477

SEQ ID NO: 4702 - DNA, 201 bp, Homo sapiens; identical to SEQ ID NO: 4478

SEQ ID NO: 4703 - DNA, 201 bp, Homo sapiens; identical to SEQ ID NO: 4479

SEQ ID NO: 4704 - DNA, 201 bp, Homo sapiens; identical to SEQ ID NO: 4480

SEQ ID NO: 4705 - DNA, 201 bp, Homo sapiens; identical to SEQ ID NO: 4481

SEQ ID NO: 4706 - DNA, 201 bp, Homo sapiens; identical to SEQ ID NO: 4482

SEQ ID NO: 4707 - DNA, 201 bp, Homo sapiens; identical to SEQ ID NO: 4483

SEQ ID NO: 4708 - DNA, 201 bp, Homo sapiens; identical to SEQ ID NO: 4484

SEQ ID NO: 4709 - DNA, 201 bp, Homo sapiens; identical to SEQ ID NO: 4485

SEQ ID NO: 4710 - DNA, 201 bp, Homo sapiens; identical to SEQ ID NO: 4486

SEQ ID NO: 4711 - DNA, 201 bp, Homo sapiens; identical to SEQ ID NO: 4487

SEQ ID NO: 4712 - DNA, 201 bp, Homo sapiens; identical to SEQ ID NO: 4488

SEQ ID NO: 4713 - DNA, 201 bp, Homo sapiens; identical to SEQ ID NO: 4489

SEQ ID NO: 4714 - DNA, 201 bp, Homo sapiens; identical to SEQ ID NO: 4490

SEQ ID NO: 4715 - DNA, 201 bp, Homo sapiens; identical to SEQ ID NO: 4491

SEQ ID NO: 4716 - DNA, 201 bp, Homo sapiens; identical to SEQ ID NO: 4492

SEQ ID NO: 4717 - DNA, 201 bp, Homo sapiens; identical to SEQ ID NO: 4493

SEQ ID NO: 4718 - DNA, 201 bp, Homo sapiens; identical to SEQ ID NO: 4494

SEQ ID NO: 4719 - DNA, 201 bp, Homo sapiens; identical to SEQ ID NO: 4495

SEQ ID NO: 4720 - DNA, 201 bp, Homo sapiens; identical to SEQ ID NO: 4496

SEQ ID NO: 4721 - DNA, 201 bp, Homo sapiens; identical to SEQ ID NO: 4497

SEQ ID NO: 4722 - DNA, 201 bp, Homo sapiens; identical to SEQ ID NO: 4498

SEQ ID NO: 4723 - DNA, 201 bp, Homo sapiens; identical to SEQ ID NO: 4499

SEQ ID NO: 4724 - DNA, 201 bp, Homo sapiens; identical to SEQ ID NO: 4500

SEQ ID NO: 4725 - DNA, 201 bp, Homo sapiens; identical to SEQ ID NO: 4501

SEQ ID NO: 4726 - DNA, 201 bp, Homo sapiens; identical to SEQ ID NO: 4502

SEQ ID NO: 4727 - DNA, 201 bp, Homo sapiens; identical to SEQ ID NO: 4503

SEQ ID NO: 4728 - DNA, 201 bp, Homo sapiens; identical to SEQ ID NO: 4504

SEQ ID NO: 4729 - DNA, 201 bp, Homo sapiens; identical to SEQ ID NO: 4505

SEQ ID NO: 4730 - DNA, 201 bp, Homo sapiens; identical to SEQ ID NO: 4506

SEQ ID NO: 4731 - DNA, 201 bp, Homo sapiens; identical to SEQ ID NO: 4507

SEQ ID NO: 4732 - DNA, 201 bp, Homo sapiens; identical to SEQ ID NO: 4508

SEQ ID NO: 4733 - DNA, 201 bp, Homo sapiens; identical to SEQ ID NO: 4509

SEQ ID NO: 4734 - DNA, 201 bp, Homo sapiens; identical to SEQ ID NO: 4510

SEQ ID NO: 4735 - DNA, 201 bp, Homo sapiens; identical to SEQ ID NO: 4511

SEQ ID NO: 4736 - DNA, 201 bp, Homo sapiens; identical to SEQ ID NO: 4512

SEQ ID NO: 4737 - DNA, 201 bp, Homo sapiens; identical to SEQ ID NO: 4513

SEQ ID NO: 4738 - DNA, 201 bp, Homo sapiens; identical to SEQ ID NO: 4514

SEQ ID NO: 4739 - DNA, 201 bp, Homo sapiens; identical to SEQ ID NO: 4515

SEQ ID NO: 4740 - DNA, 201 bp, Homo sapiens; identical to SEQ ID NO: 4516

SEQ ID NO: 4741 - DNA, 201 bp, Homo sapiens; identical to SEQ ID NO: 4517

SEQ ID NO: 4742 - DNA, 201 bp, Homo sapiens; identical to SEQ ID NO: 4518

SEQ ID NO: 4743 - DNA, 201 bp, Homo sapiens; identical to SEQ ID NO: 4519

SEQ ID NO: 4744 - DNA, 201 bp, Homo sapiens; identical to SEQ ID NO: 4520

SEQ ID NO: 4745 - DNA, 201 bp, Homo sapiens; identical to SEQ ID NO: 4521

SEQ ID NO: 4746 - DNA, 201 bp, Homo sapiens; identical to SEQ ID NO: 4522

SEQ ID NO: 4747 - DNA, 201 bp, Homo sapiens; identical to SEQ ID NO: 4523

SEQ ID NO: 4748 - DNA, 201 bp, Homo sapiens; identical to SEQ ID NO: 4524

SEQ ID NO: 4749 - DNA, 201 bp, Homo sapiens; identical to SEQ ID NO: 4525

SEQ ID NO: 4750 - DNA, 201 bp, Homo sapiens; identical to SEQ ID NO: 4526

SEQ ID NO: 4751 - DNA, 201 bp, Homo sapiens; identical to SEQ ID NO: 4527

SEQ ID NO: 4752 - DNA, 201 bp, Homo sapiens; identical to SEQ ID NO: 4528

SEQ ID NO: 4753 - DNA, 201 bp, Homo sapiens; identical to SEQ ID NO: 4529

SEQ ID NO: 4754 - DNA, 201 bp, Homo sapiens; identical to SEQ ID NO: 4530

SEQ ID NO: 4755 - DNA, 201 bp, Homo sapiens; identical to SEQ ID NO: 4531

SEQ ID NO: 4756 - DNA, 161 bp, Homo sapiens; identical to SEQ ID NO: 4682

SEQ ID NO: 4757 - DNA, 154 bp, Homo sapiens; identical to SEQ ID NO: 4683

SEQ ID NO: 4758 - DNA, 201 bp, Homo sapiens; identical to SEQ ID NO: 4535

SEQ ID NO: 4759 - DNA, 201 bp, Homo sapiens; identical to SEQ ID NO: 4685

SEQ ID NO: 4760 - DNA, 201 bp, Homo sapiens; identical to SEQ ID NO: 4686

SEQ ID NO: 4761 - DNA, 201 bp, Homo sapiens; identical to SEQ ID NO: 4538

SEQ ID NO: 4762 - DNA, 201 bp, Homo sapiens; identical to SEQ ID NO: 4539

SEQ ID NO: 4763 - DNA, 201 bp, Homo sapiens; identical to SEQ ID NO: 4540

SEQ ID NO: 4764 - DNA, 201 bp, Homo sapiens; identical to SEQ ID NO: 4541

SEQ ID NO: 4765 - DNA, 201 bp, Homo sapiens; identical to SEQ ID NO: 4542

SEQ ID NO: 4766 - DNA, 201 bp, Homo sapiens; identical to SEQ ID NO: 4543

SEQ ID NO: 4767 - DNA, 201 bp, Homo sapiens; identical to SEQ ID NO: 4544

SEQ ID NO: 4768 - DNA, 201 bp, Homo sapiens; identical to SEQ ID NO: 4545

SEQ ID NO: 4769 - DNA, 201 bp, Homo sapiens; identical to SEQ ID NO: 4695

SEQ ID NO: 4770 - DNA, 201 bp, Homo sapiens
acccccttcgatgacctccagagcctcccaaacgacgtgatctcttccctgaagaacaggctgaaaaaggtctccacaaccactggggatggtgtggccaragcgttcctcaaggcccaggctgctttcttcggtagctaccgaaacgctctgaaaatcgagccggaggagccgatcactttctgtgaggaagccttcgtg

SEQ ID NO: 4771 - DNA, 201 bp, Homo sapiens
aagaacaggctgaaaaaggtctccacaaccactggggatggtgtggccagagcgttcctcaaggcccaggctgctttcttcggtagctaccgaaacgctcygaaaatcgagccggaggagccgatcactttctgtgaggaagccttcgtgtcccactaccgctccggagccatgaggcagttcctgcagaacgccacacag

SEQ ID NO: 4772 - DNA, 201 bp, Homo sapiens
ggcctggggaccatgggctccaggatcaagcagaatccagagaccacatttgaagtatatgttgaagtggcctatcccaggacaggtggcactctttcagrtcctgaggtgcagaggcaattcccggaggactacagtgaccaggaagttctacagactttgaccaagttttgtttccccttctatgtggacagcctcaca

SEQ ID NO: 4773 - DNA, 201 bp, Homo sapiens
atccacgggtctgcggcgatgctctaccccatgtactggcagcacgtgtacatccccgtgctgccgccgcatctgctggactactgctgtgctcccatgcrctacctcataggaatccatttaagtttaatggagaaagtcagaaacatggccctggatgatgtcgtgatcctgaatgtggacaccaacaccctggaaacc

SEQ ID NO: 4774 - DNA, 201 bp, Homo sapiens
atccccgtgctgccgccgcatctgctggactactgctgtgctcccatgccctacctcataggaatccatttaagtttaatggagaaagtcagaaacatggycctggatgatgtcgtgatcctgaatgtggacaccaacaccctggaaacccccttcgatgacctccagagcctcccaaacgacgtgatctcttccctgaag

SEQ ID NO: 4775 - DNA, 201 bp, Homo sapiens
gggctggagcgagtacattaacccctggaggcggcggcggcggcgagggagcgagcctcgagcgggcgggccccagcctgagggaagggaggaaggggcgrggagagcgccagagggaggccggtcggccgcgggcgggcgggcagcgcagcgccgagcggggcccgcgggcccatgaggaggcctggggaccatgggctc

SEQ ID NO: 4776 - DNA, 201 bp, Homo sapiens
ccactgggccaggccaagagcttagaggaccttcgtgcccccaaagacctgagggagcagccagggacctttgactatcagaggctggatctgggcgggartgagaggagccgcggggtgacagtggccttgaagcttacccacccgtacaacaagctctggagcctgggccaggacgacatggccatccccagcaagccc

SEQ ID NO: 4777 - DNA, 201 bp, Homo sapiens; identical to SEQ ID NO: 4770

SEQ ID NO: 4778 - DNA, 201 bp, Homo sapiens
agcatttcgacccgagctctcatttcctatttgtgaagggtcagacacagtctacccaggggtgtctgggggacaagggggtctctggagatgtcacccakggagccccctctatgtctgagaggctgccactgctgcacatgctcagtgaggcttggcggccatcctggcacatggctcttcctgggtcaaccgtgacct

SEQ ID NO: 4779 - DNA, 201 bp, Homo sapiens
gccaagagcttagaggaccttcgtgcccccaaagacctgagggagcagccagggacctttgactatcagaggctggatctgggcgggagtgagaggagccrcggggtgacagtggccttgaagcttacccacccgtacaacaagctctggagcctgggccaggacgacatggccatccccagcaagcccccagctgcctcc

SEQ ID NO: 4780 - DNA, 201 bp, Homo sapiens; identical to SEQ ID NO: 4771

SEQ ID NO: 4781 - DNA, 201 bp, Homo sapiens; identical to SEQ ID NO: 4772

SEQ ID NO: 4782 - DNA, 201 bp, Homo sapiens
aagactgcaccgtccccactggtggaggccaaggaccccaagctccgagaagaccggcggccaatcacagtccactttggacaggtgcgcccacctcgtcracatgttgttaagagaccaaagagcaacatcgcagtggaaggccggaggacgtctgtgccgagccctgagcagccgcagccgtatcggacactcagggag

SEQ ID NO: 4783 - DNA, 201 bp, Homo sapiens
ctcccaggccccctcaaggcctggagccaacactgcagccctctgctcctcaacaggccagagacccctttgaggatttgttacagaaaaccaagcaagaygtgagcccgagtccggccctggccccggccccagactcggtggagcagctcaggaagcagtgggagaccttcgagtgagccgggccctgagggtggggga

SEQ ID NO: 4784 - DNA, 201 bp, Homo sapiens
ccgatcactttctgtgaggaagccttcgtgtcccactaccgctccggagccatgaggcagttcctgcagaacgccacacagctgcagctcttcaagcagtrtattgatggtcgattagatcttctcaattccggcgaaggtttcagtgatgtttttgaagaggaaatcaacatgggcgagtacgctggcagtgacaaactg

SEQ ID NO: 4785 - DNA, 201 bp, Homo sapiens
atgaggcagttcctgcagaacgccacacagctgcagctcttcaagcagtttattgatggtcgattagatcttctcaattccggcgaaggtttcagtgatgyttttgaagaggaaatcaacatgggcgagtacgctggcagtgacaaactgtaccatcagtggctctccactgtccggaaaggaagtggagcaattctgaat

SEQ ID NO: 4786 - DNA, 201 bp, Homo sapiens
tgtttccccttctatgtggacagcctcacagttagccaagttggccagaacttcacattcgtgctcactgacattgacagcaaacagagattcgggttctrccgcttatcttcaggagcgaagagctgcttctgtatcttaagctatctcccctggttcgaggtattttataagctgcttaacatcctggcagattacacg

SEQ ID NO: 4787 - DNA, 201 bp, Homo sapiens
aggctcttaactcagcagggatatcgtacatctattgctctacctcaggggtccagtgatacccactagatcttccaaggaaaaacataattctttcaaayggtgtgtatttggcaaagagctcttcaaatctgggagagggacttcctcaaggttttcctgtgtgcagtggatccacatagctaatatgacagctagtca

SEQ ID NO: 4788 - DNA, 201 bp, Homo sapiens
atatgtatgtatactcatatagatatattgtcattgaaatattcccccaaaatattctcagactaaacctgacatagggaacaccgagaatgaaaacatckttaacaccaaaactgaattcttatgcagaatttcctagcccatagatgacaacctgactttctgtatgttaaagtagatgtaatgaattattattattac

SEQ ID NO: 4789 - DNA, 201 bp, Homo sapiens
cagactaaacctgacatagggaacaccgagaatgaaaacatcgttaacaccaaaactgaattcttatgcagaatttcctagcccatagatgacaacctgastttctgtatgttaaagtagatgtaatgaattattattattacagtggtcacgattttcttcagtgtttatgattataaaaattgacatgaacatctttca

SEQ ID NO: 4790 - DNA, 201 bp, Homo sapiens
gaaaattggaatttcattggaattcatgtattggtttcagtaccaagtgactggtggcccaattctttaatgggacaaatattgtttcctatatatatgtrtatgttttatatatgtatgtatactcatatagatatattgtcattgaaatattcccccaaaatattctcagactaaacctgacatagggaacaccgagaa

SEQ ID NO: 4791 - DNA, 201 bp, Homo sapiens
gccgtggggcatttgtgttggcttcctctgtcagtttggaatcatgcccctcacaggattcatcctgtcggtggcctttgacatcctcccgctccaggccrtagtggtgctcattataggatgctgccctggaggaactgcctccaatatcttggcctattgggtcgatggcgacatggacctgagcgtcagcatgaccac

SEQ ID NO: 4792 - DNA, 201 bp, Homo sapiens
atgcaacagtttgctctggtgcatcctgtgtggtacctgagagcaatttcaataacatcctaagtgtggtcctaagtacggtgctgaccatcctgttggcyttggtgatgttctccatgggatgcaacgtggaaatcaagaaatttctagggcacataaagcggccgtggggcatttgtgttggcttcctctgtcagtttg

SEQ ID NO: 4793 - DNA, 201 bp, Homo sapiens
ctttttatatggcatggttcattatcatgccaataaatgattaatcgtaactctctgtcttgaccaataattttgctggacttttgtgattcacaacgtgytctgtgttgtaatgctacctcttgaaactgacatcctagctttattgttttttattacttccctaaggtggctttcaaaagagacaccaagtgacatatt

SEQ ID NO: 4794 - DNA, 201 bp, Homo sapiens
ggggtttaaaagtttgatggggtagaagtaaacgttgcttaactcaaccagcagcagagccagggcccagggaccagcgcttctgtggacttggcctttcsagcagcagacccagcaatgaatgatccgaacagctgtgtggacaatgcaacagtttgctctggtgcatcctgtgtggtacctgagagcaatttcaataac

SEQ ID NO: 4795 - DNA, 201 bp, Homo sapiens
aacggttgcttttgaaacggggatgcagaacacgcagctatgttccaccatcgttcagctctccttcactcctgaggagctcaatgtcgtattcaccttcycgctcatctacagcattttccagctcgcctttgccgcaatattcttaggattttatgtggcatacaagaaatgtcatggaaaaaacaaggcagaaattcc

SEQ ID NO: 4796 - DNA, 201 bp, Homo sapiens
ttgagagaaacaccaagactctagtggaggaattaattcaatgggagatagtataaaatacatagaaaacacaagtaacagaaacctggttgaaatgcttractagagtcaattagatgtgcaggagtaagtagtataagaagaatcaagtccgagagtgatcaggaaatgagtattaaacagtatttgaaacagagaacg

SEQ ID NO: 4797 - DNA, 201 bp, Homo sapiens
gagcgtcagcatgaccacatgctccacactgcttgccctcggaatgatgccgctgtgcctccttatctataccaaaatgtgggtcgactctgggagcatcrtaattccctatgataacataggtacatctctggttgctctcgttgttcctgtttccattggaatgtttgttaatcacaaatggccccaaaaagcaaagat

SEQ ID NO: 4798 - DNA, 201 bp, Homo sapiens
attgagagaaacaccaagactctagtggaggaattaattcaatgggagatagtataaaatacatagaaaacacaagtaacagaaacctggttgaaatgctwaactagagtcaattagatgtgcaggagtaagtagtataagaagaatcaagtccgagagtgatcaggaaatgagtattaaacagtatttgaaacagagaac

SEQ ID NO: 4799 - DNA, 201 bp, Homo sapiens
gacgagttccaaattacgttcttaaaccgtaactatatttaattatttgttttggtaggacagttggcagaaaagagttaaagtgaaaattggaatttcaytggaattcatgtattggtttcagtaccaagtgactggtggcccaattctttaatgggacaaatattgtttcctatatatatgtatatgttttatatatgt

SEQ ID NO: 4800 - DNA, 201 bp, Homo sapiens
gaactgcctccaatatcttggcctattgggtcgatggcgacatggacctgagcgtcagcatgaccacatgctccacactgcttgccctcggaatgatgccrctgtgcctccttatctataccaaaatgtgggtcgactctgggagcatcgtaattccctatgataacataggtacatctctggttgctctcgttgttcctg

SEQ ID NO: 4801 - DNA, 201 bp, Homo sapiens
cctcggaatgatgccgctgtgcctccttatctataccaaaatgtgggtcgactctgggagcatcgtaattccctatgataacataggtacatctctggttkctctcgttgttcctgtttccattggaatgtttgttaatcacaaatggccccaaaaagcaaagatcatacttaaaattgggtccatcgcgggcgccatcct

SEQ ID NO: 4802 - DNA, 201 bp, Homo sapiens
gcttgccctcggaatgatgccgctgtgcctccttatctataccaaaatgtgggtcgactctgggagcatcgtaattccctatgataacataggtacatctytggttgctctcgttgttcctgtttccattggaatgtttgttaatcacaaatggccccaaaaagcaaagatcatacttaaaattgggtccatcgcgggcgc

SEQ ID NO: 4803 - DNA, 201 bp, Homo sapiens
gcctcatagagtctatttcaagtgttttggctgaaagggctttttgcatttgcatgttctgagttcagattctgctggtgcacccaagcattatgggaacrggaactcaacttagctcttccagtagaggggtgagggattctgcttttcaaattcataacattgatctttttatgcaagatttccatttacagttgaata

SEQ ID NO: 4804 - DNA, 201 bp, Homo sapiens
gagccagtccagtgacacaggatgaccttcagtatcacaacctcagcaagcagcagaatgagtccccgcagcccctcgtggagacgggaaagaagtctccrgaatctctggtcaagctggatgcaaccccattgtcctccccacggcatgtgaggatcaaaaactggggcagcgggatgactttccaagacacacttcacc

SEQ ID NO: 4805 - DNA, 201 bp, Homo sapiens
gctccccatcaagccctttacttgacctcctaacaagtagcaccctggattgatcggagcctcctctctcaaactggggcctccctggtcccttggagacraaatcttaaatgccaggcctggcaagtgggtgaaagatggaacttgctgctgagtgcaccacttcaagtgaccaccaggaggtgctatcgcaccactgtg

SEQ ID NO: 4806 - DNA, 201 bp, Homo sapiens
tcagctcaccccgatgggagaaggggatgagctcagtgggcaggaggacgccttccgcagctgggccgtgcaaaccttcaaggcagcctgtgagacgtttsatgtccgaggcaaacagcacattcagatccccaagctctacacctccaatgtgacctgggacccgcaccactacaggctcgtgcaggactcacagccttt

SEQ ID NO: 4807 - DNA, 201 bp, Homo sapiens
ccatagagatggcctgtccttggaaatttctgttcaagaccaaattccaccagtatgcaatgaatggggaaaaagacatcaacaacaatgtggagaaagcyccctgtgccacctccagtccagtgacacaggatgaccttcagtatcacaacctcagcaagcagcagaatgagtccccgcagcccctcgtggagacgggaa

SEQ ID NO: 4808 - DNA, 201 bp, Homo sapiens
acccccgtgtttcaccaggagatgctgaactacgtcctgtcccctttctactactatcaggtagaggcctggaaaacccatgtctggcaggacgagaagcrgagacccaagagaagagagattccattgaaagtcttggtcaaagctgtgctctttgcctgtatgctgatgcgcaagacaatggcgtcccgagtcagagtc

SEQ ID NO: 4809 - DNA, 201 bp, Homo sapiens
tcctggtggaactctcctgtgaggatggccaaggcctgaactacctgccgggggagcaccttggggtttgcccaggcaaccagccggccctggtccaaggyatcctggagcgagtggtggatggccccacaccccaccagacagtgcgcctggaggccctggatgagagtggcagctactgggtcagtgacaagaggctgc

SEQ ID NO: 4810 - DNA, 201 bp, Homo sapiens
cctccagtccagtgacacaggatgaccttcagtatcacaacctcagcaagcagcagaatgagtccccgcagcccctcgtggagacgggaaagaagtctccrgaatctctggtcaagctggatgcaaccccattgtcctccccacggcatgtgaggatcaaaaactggggcagcgggatgactttccaagacacacttcacc

SEQ ID NO: 4811 - DNA, 201 bp, Homo sapiens
tgcccccctgctcactcagccaggccctcacctacttcctggacatcaccacacccccacccagctgctgctccaaaagctggcccaggtggccacagaaragcctgagagacgaggctggaggccctgtgccagccctcagagtacagcaagtggaagttcaccaacagccccacattcctggaggtgctagaggagttc

SEQ ID NO: 4812 - DNA, 201 bp, Homo sapiens
aggtggccacagaaaagcctgagagacgaggctggaggccctgtgccagccctcagagtacagcaagtggaagttcaccaacagccccacattcctggagytgctagaggagttcccgtccctgcgggtgtctgctggcttcctgctttcccagctccccattctgaagcccaggttctactccatcagctcctcccggga

SEQ ID NO: 4813 - DNA, 201 bp, Homo sapiens
ttccccagctgtgcatcgacctgggctggaagcccaagtacggccgcttcgatgtggtccccctggtcctgcaggccaatggccgtgaccctgagctcttygaaatcccacctgaccttgtgcttgaggtggccatggaacatcccaaatacgagtggtttcgggaactggagctaaagtggtacgccctgcctgcagtgg

SEQ ID NO: 4814 - DNA, 201 bp, Homo sapiens
tggccaacatgctgcttgaggtgggcggcctggagttcccagggtgccccttcaatggctggtacatgggcacagagatcggagtccgggacttctgtgaygtccagcgctacaacatcctggaggaagtgggcaggagaatgggcctggaaacgcacaagctggcctcgctctggaaagaccaggctgtcgttgagatca

SEQ ID NO: 4815 - DNA, 201 bp, Homo sapiens
cttcgccaccaagcaggcctggcgcaatgccccacgctgcattgggaggatccagtggtccaacctgcaggtcttcgatgcccgcagctgttccactgccygggaaatgtttgaacacatctgcagacacgtgcgttactccaccaacaatggcaacatcaggtcggccatcaccgtgttcccccagcggagtgatggcaa

SEQ ID NO: 4816 - DNA, 201 bp, Homo sapiens
tcccgtccctgcgggtgtctgctggcttcctgctttcccagctccccattctgaagcccaggttctactccatcagctcctcccgggatcacacgcccacrgagatccacctgactgtggccgtggtcacctaccacacccgagatggccagggtcccctgcaccacggcgtctgcagcacatggctcaacagcctgaagc

SEQ ID NO: 4817 - DNA, 201 bp, Homo sapiens
accacacccgagatggccagggtcccctgcaccacggcgtctgcagcacatggctcaacagcctgaagccccaagacccagtgccctgctttgtgcggaaygccagcggcttccacctccccgaggatccctcccatccttgcatcctcatcgggcctggcacaggcatcgcgcccttccgcagtttctggcagcaacggc

SEQ ID NO: 4818 - DNA, 201 bp, Homo sapiens
tacaggctgagctgcctggaggaggaacggctgctgttggtggtgaccagtacgtttggcaatggagactgccctggcaatggagagaaactgaagaaatygctcttcatgctgaaagagctcaacaacaaattcaggtacgctgtgtttggcctcggctccagcatgtaccctcggttctgcgcctttgctcatgacatt

SEQ ID NO: 4819 - DNA, 201 bp, Homo sapiens
ctgcagcacatggctcaacagcctgaagccccaagacccagtgccctgctttgtgcggaatgccagcggcttccacctccccgaggatccctcccatcctygcatcctcatcgggcctggcacaggcatcgcgcccttccgcagtttctggcagcaacggctccatgactcccagcacaagggagtgcggggaggccgcat

SEQ ID NO: 4820 - DNA, 201 bp, Homo sapiens
tgcagcccagcagcctggagatgtcagcgctctgagggcctacaggaggggttaaagctgccggcacagaacttaaggatggagccagctctgcattatcygaggtcacagggcctggggagatggaggaaagtgatatcccccagcctcaagtcttatttcctcaacgttgctccccatcaagccctttacttgacctcc

SEQ ID NO: 4821 - DNA, 201 bp, Homo sapiens
taaagctgccggcacagaacttaaggatggagccagctctgcattatctgaggtcacagggcctggggagatggaggaaagtgatatcccccagcctcaaktcttatttcctcaacgttgctccccatcaagccctttacttgacctcctaacaagtagcaccctggattgatcggagcctcctctctcaaactggggcct

SEQ ID NO: 4822 - DNA, 201 bp, Homo sapiens; identical to SEQ ID NO: 4805

SEQ ID NO: 4823 - DNA, 201 bp, Homo sapiens; identical to SEQ ID NO: 4806

SEQ ID NO: 4824 - DNA, 201 bp, Homo sapiens; identical to SEQ ID NO: 4807

SEQ ID NO: 4825 - DNA, 201 bp, Homo sapiens; identical to SEQ ID NO: 4808

SEQ ID NO: 4826 - DNA, 201 bp, Homo sapiens; identical to SEQ ID NO: 4809

SEQ ID NO: 4827 - DNA, 201 bp, Homo sapiens; identical to SEQ ID NO: 4810

SEQ ID NO: 4828 - DNA, 201 bp, Homo sapiens; identical to SEQ ID NO: 4811

SEQ ID NO: 4829 - DNA, 201 bp, Homo sapiens; identical to SEQ ID NO: 4812

SEQ ID NO: 4830 - DNA, 201 bp, Homo sapiens
tcactcagctgtgcatcgacctgggctggaagcccaagtacggccgcttcgatgtggtccccctggtcctgcaggccaatggccgtgaccctgagctcttygaaatcccacctgaccttgtgcttgaggtggccatggaacatcccaaatacgagtggtttcgggaactggagctaaagtggtacgccctgcctgcagtgg

SEQ ID NO: 4831 - DNA, 201 bp, Homo sapiens; identical to SEQ ID NO: 4814

SEQ ID NO: 4832 - DNA, 201 bp, Homo sapiens; identical to SEQ ID NO: 4815

SEQ ID NO: 4833 - DNA, 201 bp, Homo sapiens; identical to SEQ ID NO: 4816

SEQ ID NO: 4834 - DNA, 201 bp, Homo sapiens; identical to SEQ ID NO: 4817

SEQ ID NO: 4835 - DNA, 201 bp, Homo sapiens; identical to SEQ ID NO: 4818

SEQ ID NO: 4836 - DNA, 201 bp, Homo sapiens; identical to SEQ ID NO: 4819

SEQ ID NO: 4837 - DNA, 201 bp, Homo sapiens; identical to SEQ ID NO: 4820

SEQ ID NO: 4838 - DNA, 201 bp, Homo sapiens; identical to SEQ ID NO: 4821

SEQ ID NO: 4839 - DNA, 201 bp, Homo sapiens; identical to SEQ ID NO: 4805

SEQ ID NO: 4840 - DNA, 201 bp, Homo sapiens; identical to SEQ ID NO: 4806

SEQ ID NO: 4841 - DNA, 201 bp, Homo sapiens; identical to SEQ ID NO: 4808

SEQ ID NO: 4842 - DNA, 201 bp, Homo sapiens; identical to SEQ ID NO: 4807

SEQ ID NO: 4843 - DNA, 201 bp, Homo sapiens; identical to SEQ ID NO: 4809

SEQ ID NO: 4844 - DNA, 201 bp, Homo sapiens
gcccccctgctcactcagccaggccctcacctacttcctggacatcaccacacccccaacccagctgctgctccaaaagctggcccaggtggccacagaaragcctgagagacagaggctggaggccctgtgccagccctcagagtacagcaagtggaagttcaccaacagccccacattcctggaggtgctagaggagtt

SEQ ID NO: 4845 - DNA, 201 bp, Homo sapiens
ggtggccacagaagagcctgagagacagaggctggaggccctgtgccagccctcagagtacagcaagtggaagttcaccaacagccccacattcctggagytgctagaggagttcccgtccctgcgggtgtctgctggcttcctgctttcccagctccccattctgaagcccaggttctactccatcagctcctcccggga

SEQ ID NO: 4846 - DNA, 201 bp, Homo sapiens; identical to SEQ ID NO: 4830

SEQ ID NO: 4847 - DNA, 201 bp, Homo sapiens; identical to SEQ ID NO: 4814

SEQ ID NO: 4848 - DNA, 201 bp, Homo sapiens; identical to SEQ ID NO: 4817

SEQ ID NO: 4849 - DNA, 201 bp, Homo sapiens; identical to SEQ ID NO: 4819

SEQ ID NO: 4850 - DNA, 201 bp, Homo sapiens; identical to SEQ ID NO: 4821

SEQ ID NO: 4851 - DNA, 201 bp, Homo sapiens; identical to SEQ ID NO: 4810

SEQ ID NO: 4852 - DNA, 201 bp, Homo sapiens; identical to SEQ ID NO: 4815

SEQ ID NO: 4853 - DNA, 201 bp, Homo sapiens; identical to SEQ ID NO: 4816

SEQ ID NO: 4854 - DNA, 201 bp, Homo sapiens; identical to SEQ ID NO: 4818

SEQ ID NO: 4855 - DNA, 201 bp, Homo sapiens; identical to SEQ ID NO: 4820

SEQ ID NO: 4856 - DNA, 201 bp, Homo sapiens
ccctctgtgcctaaagattgccccacacccatgggaaccaaagggaagaagcagttgccagatgcccagctcctggcccgccgcttcctgctcaggaggamgttcatacctgacccccaaggcaccaacctcatgtttgccttctttgcacaacacttcacccaccagttcttcaaaacttctggcaagatgggtcctggc

SEQ ID NO: 4857 - DNA, 201 bp, Homo sapiens
tggctgtgggccaggaggtgtttgggctgcttcctgggctcatgctgtatgccacgctctggctacgtgagcacaaccgtgtgtgtgacctgctgaaggcygagcaccccacctggggcgatgagcagcttttccagacgacccgcctcatcctcataggggagaccatcaagattgtcatcgaggagtacgtgcagcagc

SEQ ID NO: 4858 - DNA, 201 bp, Homo sapiens
atctggaatattgtgattctgtttattcttccagaatgctgaactccttgttagcccttcagattgttaggagtggttctcatttggtctgccagaatackgggttcttagttgacaacctagaatgtcagatttctggttgatttgtaacacagtcattctaggatgtggagctactgatgaaatctgctagaaagttag

SEQ ID NO: 4859 - DNA, 201 bp, Homo sapiens
cttcacccaccagttcttcaaaacttctggcaagatgggtcctggcttcaccaaggccttgggccatggggtagacctcggccacatttatggagacaatmtggagcgtcagtatcaactgcggctctttaaggatgggaaactcaagtaccaggtgctggatggagaaatgtacccgccctcggtagaagaggcgcctgt

SEQ ID NO: 4860 - DNA, 201 bp, Homo sapiens
ggccagggctgatggtcttaaatgctcattttctggtttggcatggtgagtgttggggttgacatttagaactttaagtctcacccattatctggaatatygtgattctgtttattcttccagaatgctgaactccttgttagcccttcagattgttaggagtggttctcatttggtctgccagaatactgggttcttagt

SEQ ID NO: 4861 - DNA, 201 bp, Homo sapiens
tctggaggggagagctttgtgcttgtcattccagagtgctgaggccagggctgatggtcttaaatgctcattttctggtttggcatggtgagtgttggggytgacatttagaactttaagtctcacccattatctggaatattgtgattctgtttattcttccagaatgctgaactccttgttagcccttcagattgttag

SEQ ID NO: 4862 - DNA, 201 bp, Homo sapiens
tcctgctcaggaggaagttcatacctgacccccaaggcaccaacctcatgtttgccttctttgcacaacacttcacccaccagttcttcaaaacttctggmaagatgggtcctggcttcaccaaggccttgggccatggggtagacctcggccacatttatggagacaatctggagcgtcagtatcaactgcggctcttta

SEQ ID NO: 4863 - DNA, 201 bp, Homo sapiens
acctggctccggaattcactgcggcccagcccctctttcacccacttcctgctcactcacgggcgctggttctgggagtttgtcaatgccaccttcatccragagatgctcatgcgcctggtactcacagtgcgctccaaccttatccccagtccccccacctacaactcagcacatgactacatcagctgggagtctttc

SEQ ID NO: 4864 - DNA, 201 bp, Homo sapiens
ggaagggctttgagggtggaaggatgggatgggttccagaggtattcctctcttaaatgcaagtgcctagattaggtagactttgcttagtattgacaackgcacatgaaagttttgcaaagggaaacaggctaaatgcaccaagaaagcttcttcagagtgaagaatcttaatgcttgtaatttaaacatttgttcctgg

SEQ ID NO: 4865 - DNA, 201 bp, Homo sapiens
tgggctggagctccgggcagtgtgcgaggcgcacgcacaggagcctgcactctgcgtcccgcaccccagcagccgcgccatgagccggagtctcttgctcyggttcttgctgttcctgctcctgctcccgccgctccccgtcctgctcgcggacccaggggcgcccacgccagtgaatccctgttgttactatccatgcca

SEQ ID NO: 4866 - DNA, 201 bp, Homo sapiens
ggttcttgctgttcctgctcctgctcccgccgctccccgtcctgctcgcggacccaggggcgcccacgccagtgaatccctgttgttactatccatgccarcaccagggcatctgtgtccgcttcggccttgaccgctaccagtgtgactgcacccgcacgggctattccggccccaactgcaccatccctggcctgtgga

SEQ ID NO: 4867 - DNA, 201 bp, Homo sapiens
gcccttctcaagactttagcttttccttccatccggtggcctattccaggaattcctcttttgcttaaatcagttggagtttgtgtctgttgcttgtaatmaagcctttatggctgctgggctgagtgacacaagcactttaatggcctggagggacttttaatcagtgaagatgcaatcagacaagtgttttggaaagag

SEQ ID NO: 4868 - DNA, 201 bp, Homo sapiens
gattcattttcctgttcagtgagatatcatagagacggagatcctaaggtccaacaagaatgcattccctgaatctgtgcctgcactgagagggcaaggargtggggtgttcttcttgggacccccactaagaccctggtctgaggatgtagagagaacaggtgggctgtattcacgccattggttggaagctaccagagc

SEQ ID NO: 4869 - DNA, 201 bp, Homo sapiens
atttggtggatgtgatggttggttttatttgtcagtttggttgggctatagcacacagttatttaatcaaacagtaatctaggtgtggctgtgaaggtatkttgtagatgtgattaacatctacaatcagttgactttaagtgaaagagattacttaaataatttgggtgagctgcacctgattagttgaaaggcctcaag

SEQ ID NO: 4870 - DNA, 201 bp, Homo sapiens
gcaagaggtttggcatgaaaccctacacctccttccaggagctcgtaggagagaaggagatggcagcagagttggaggaattgtatggagacattgatgcrttggagttctaccctggactgcttcttgaaaagtgccatccaaactctatctttggggagagtatgatagagattggggctcccttttccctcaagggtc

SEQ ID NO: 4871 - DNA, 201 bp, Homo sapiens
cacctccatgttggtggactatggggttgaggccctggtggatgccttctctcgccagattgctggccggatcggtgggggcaggaacatggaccaccacrtcctgcatgtggctgtggatgtcatcagggagtctcgggagatgcggctgcagcccttcaatgagtaccgcaagaggtttggcatgaaaccctacacctc

SEQ ID NO: 4872 - DNA, 201 bp, Homo sapiens
tgaaaccctacacctccttccaggagctcgtaggagagaaggagatggcagcagagttggaggaattgtatggagacattgatgcgttggagttctacccyggactgcttcttgaaaagtgccatccaaactctatctttggggagagtatgatagagattggggctcccttttccctcaagggtctcctagggaatccca

SEQ ID NO: 4873 - DNA, 201 bp, Homo sapiens
tcctgcatgtggctgtggatgtcatcagggagtctcgggagatgcggctgcagcccttcaatgagtaccgcaagaggtttggcatgaaaccctacacctcyttccaggagctcgtaggagagaaggagatggcagcagagttggaggaattgtatggagacattgatgcgttggagttctaccctggactgcttcttgaaa

SEQ ID NO: 4874 - DNA, 201 bp, Homo sapiens
cggtgggggcaggaacatggaccaccacatcctgcatgtggctgtggatgtcatcagggagtctcgggagatgcggctgcagcccttcaatgagtaccgcragaggtttggcatgaaaccctacacctccttccaggagctcgtaggagagaaggagatggcagcagagttggaggaattgtatggagacattgatgcgtt

SEQ ID NO: 4875 - DNA, 201 bp, Homo sapiens
cagcttttccagacgacccgcctcatcctcataggggagaccatcaagattgtcatcgaggagtacgtgcagcagctgagtggctatttcctgcagctgaratttgacccagagctgctgttcggtgtccagttccaataccgcaaccgcattgccatggagttcaaccatctctaccactggcaccccctcatgcctgac

SEQ ID NO: 4876 - DNA, 201 bp, Homo sapiens; identical to SEQ ID NO: 4856

SEQ ID NO: 4877 - DNA, 201 bp, Homo sapiens; identical to SEQ ID NO: 4857

SEQ ID NO: 4878 - DNA, 201 bp, Homo sapiens; identical to SEQ ID NO: 4858

SEQ ID NO: 4879 - DNA, 201 bp, Homo sapiens; identical to SEQ ID NO: 4859

SEQ ID NO: 4880 - DNA, 201 bp, Homo sapiens; identical to SEQ ID NO: 4860

SEQ ID NO: 4881 - DNA, 201 bp, Homo sapiens; identical to SEQ ID NO: 4861

SEQ ID NO: 4882 - DNA, 201 bp, Homo sapiens; identical to SEQ ID NO: 4862

SEQ ID NO: 4883 - DNA, 201 bp, Homo sapiens; identical to SEQ ID NO: 4863

SEQ ID NO: 4884 - DNA, 201 bp, Homo sapiens; identical to SEQ ID NO: 4864

SEQ ID NO: 4885 - DNA, 201 bp, Homo sapiens; identical to SEQ ID NO: 4865

SEQ ID NO: 4886 - DNA, 201 bp, Homo sapiens; identical to SEQ ID NO: 4866

SEQ ID NO: 4887 - DNA, 201 bp, Homo sapiens; identical to SEQ ID NO: 4867

SEQ ID NO: 4888 - DNA, 201 bp, Homo sapiens; identical to SEQ ID NO: 4868

SEQ ID NO: 4889 - DNA, 201 bp, Homo sapiens; identical to SEQ ID NO: 4869

SEQ ID NO: 4890 - DNA, 201 bp, Homo sapiens; identical to SEQ ID NO: 4870

SEQ ID NO: 4891 - DNA, 201 bp, Homo sapiens
ccgcaaccgcattgccatggagttcaaccatctctaccactggcaccccctcatgcctgactccttcaagatcggtgggggcaggaacatggaccaccacrtcctgcatgtggctgtggatgtcatcagggagtctcgggagatgcggctgcagcccttcaatgagtaccgcaagaggtttggcatgaaaccctacacctc

SEQ ID NO: 4892 - DNA, 201 bp, Homo sapiens; identical to SEQ ID NO: 4872

SEQ ID NO: 4893 - DNA, 201 bp, Homo sapiens; identical to SEQ ID NO: 4873

SEQ ID NO: 4894 - DNA, 201 bp, Homo sapiens; identical to SEQ ID NO: 4874

SEQ ID NO: 4895 - DNA, 201 bp, Homo sapiens; identical to SEQ ID NO: 4875

SEQ ID NO: 4896 - DNA, 201 bp, Homo sapiens
tgctaaaccaattccgaacagatttggaaaagctggaaaaggagattacagcccggaatgagcaacttgactggccctatgaatatctgaagcccagctgyatagagaacagtgtcaccatctgagccctagagtgactctacctgcaagatttcacatcagctttaggactgacatttctatcttgaatttcatgctttc

SEQ ID NO: 4897 - DNA, 201 bp, Homo sapiens
ggcaggatgatgagttgttcagctaccagttcctcaatggtgccaaccccatgctgttgagacgctcgacctctctgccctccaggctagtgctgccctcrgggatggaagagcttcaggctcaactggagaaagaacttcagaatggttccctgtttgaagctgacttcatccttctggatggaattccagccaacgtga

SEQ ID NO: 4898 - DNA, 201 bp, Homo sapiens
gcccccacccaccaccaaggaagatgtgacgatggccacagtgatggggtcactacctgatgtccggcaggcctgtcttcaaatggccatctcatggcatytgagtcgccgccagccagacatggtgcctctggggcaccacaaagaaaaatatttctcaggccccaagcccaaagctgtgctaaaccaattccgaacaga

SEQ ID NO: 4899 - DNA, 201 bp, Homo sapiens
atccgaggagagaagcaatacctggctgcccccctcgttatgctgaagatggagcccaatgggaagctgcagcccatggtcatccagattcagcctcccarccccagctctccaaccccaacactgttcctgccctcagaccccccacttgcctggctcctggcaaagtcctgggtccgaaattcagatttccaactgcac

SEQ ID NO: 4900 - DNA, 201 bp, Homo sapiens
gcctgctgggactcccaggtgctctctatgcccatgatgctttacggctctgggagatcattgccaggtatgtggaggggatcgtccacctcttctaccaragggatgacatagtgaagggggaccctgagctgcaggcctggtgtcgggagatcacggaggtggggctgtgccaggcccaggaccgaggtttccctgtct

SEQ ID NO: 4901 - DNA, 201 bp, Homo sapiens
agccagacatggtgcctctggggcaccacaaagaaaaatatttctcaggccccaagcccaaagctgtgctaaaccaattccgaacagatttggaaaagctrgaaaaggagattacagcccggaatgagcaacttgactggccctatgaatatctgaagcccagctgcatagagaacagtgtcaccatctgagccctagagt

SEQ ID NO: 4902 - DNA, 201 bp, Homo sapiens
cgtaaggatgatctacctccaaatatgagattccatgaggagaagaggctggactttgaatggacactgaaggcaggggctctggagatggccctcaaacrtgtttacaccctcctgagctcctggaactgcctagaagactttgatcagatcttctggggccagaagagtgccctggctgagaaggttcgccagtgctgg

SEQ ID NO: 4903 - DNA, 201 bp, Homo sapiens
tcctgccctcagaccccccacttgcctggctcctggcaaagtcctgggtccgaaattcagatttccaactgcacgagatccagtatcacttgctgaacackcacctggtggctgaggtcatcgctgtcgccaccatgcggtgcctcccaggactgcaccccatcttcaagttcctgatcccccatatccgctacaccatgg

SEQ ID NO: 4904 - DNA, 201 bp, Homo sapiens
ttcagctaccagttcctcaatggtgccaaccccatgctgttgagacgctcgacctctctgccctccaggctagtgctgccctcggggatggaagagcttcrggctcaactggagaaagaacttcagaatggttccctgtttgaagctgacttcatccttctggatggaattccagccaacgtgatccgaggagagaagcaa

SEQ ID NO: 4905 - DNA, 201 bp, Homo sapiens; identical to SEQ ID NO: 4896

SEQ ID NO: 4906 - DNA, 201 bp, Homo sapiens; identical to SEQ ID NO: 4897

SEQ ID NO: 4907 - DNA, 201 bp, Homo sapiens; identical to SEQ ID NO: 4898

SEQ ID NO: 4908 - DNA, 201 bp, Homo sapiens; identical to SEQ ID NO: 4899

SEQ ID NO: 4909 - DNA, 201 bp, Homo sapiens; identical to SEQ ID NO: 4900

SEQ ID NO: 4910 - DNA, 201 bp, Homo sapiens; identical to SEQ ID NO: 4901

SEQ ID NO: 4911 - DNA, 201 bp, Homo sapiens; identical to SEQ ID NO: 4902

SEQ ID NO: 4912 - DNA, 201 bp, Homo sapiens; identical to SEQ ID NO: 4903

SEQ ID NO: 4913 - DNA, 201 bp, Homo sapiens; identical to SEQ ID NO: 4904

SEQ ID NO: 4914 - DNA, 201 bp, Homo sapiens
aggatctcacagatggccactttgagaacattttagctgacaacagtgtgaacgaccagaccaaaatccttgtggttaatgctgcctactttgttggcaartggatgaagaaattttctgaatcagaaacaaaagaatgtcctttcagagtcaacaagacagacaccaaaccagtgcagatgatgaacatggaggccacgt

SEQ ID NO: 4915 - DNA, 185 bp, Homo sapiens
gataagctatccgtgttgcaggttcatggattacttctctataaaaaatatgtatttaccaaaaattttgtgacattccttctcccatctcttccttgacmtgcattgtaaataggttcttcttgttctgagattcaatattgaatttttcctatgctattgacaataaaatattattgaactac

SEQ ID NO: 4916 - DNA, 201 bp, Homo sapiens
tgcatccagagattcattttctagatacaataaattgctaatgttgctggatcaggaagccgccagtacttgtcatatgtagccttcacacagatagaccttttttttttttccaattctatcttttgtttccttttttcccataagacaatgacatacgcttttaatgaaaaggaatcacgttagaggaaaaatatttat

SEQ ID NO: 4917 - DNA, 201 bp, Homo sapiens
ttgacacatagtttttcagtctatgggtttagttactttagatggcaagcatgtaacttatattaatagtaatttgtaaagttggttggataagctatccrtgttgcaggttcatggattacttctctataaaaaatatgtatttaccaaaaattttgtgacattccttctcccatctcttccttgacctgcattgtaaat

SEQ ID NO: 4918 - DNA, 201 bp, Homo sapiens
gcatgtaacttatattaatagtaatttgtaaagttggttggataagctatccgtgttgcaggttcatggattacttctctataaaaaatatgtatttaccaaaaattttgtgacattccttctcccatctcttccttgacctgcattgtaaataggttcttcttgttctgagattcaatattgaatttttcctatgctatt

SEQ ID NO: 4919 - DNA, 201 bp, Homo sapiens
ttatttgtcaaattgtccggggtagttggcagaaatacagtcttccacaaagaaaattcctataaggaagatttggaagctcttcttcccagcactatgcyttccttctttgggatagagaatgttccagacattctcgcttccctgaaagactgaagaaagtgtagtgcatgggacccacgaaactgccctggctccagt

SEQ ID NO: 4920 - DNA, 201 bp, Homo sapiens
ccaatgccaaggtcaaactctccattccaaaatttaaggtggaaaagatgattgatcccaaggcttgtctggaaaatctagggctgaaacatatcttcagygaagacacatctgatttctctggaatgtcagagaccaagggagtggccctatcaaatgttatccacaaagtgtgcttagaaataactgaagatggtgggg

SEQ ID NO: 4921 - DNA, 201 bp, Homo sapiens
aaaattctgaattttggggattttcaaaagataatattttacatacactgtatgttatagaacttcatggatcagatctggggcagcaccctataaatcamcaccttaatatgctgcaacaaaatgtagaatattcagacaaaatggatacataaagactaagtagcccataaggggtcaaaatttgctgccaaatgcgta

SEQ ID NO: 4922 - DNA, 201 bp, Homo sapiens
ctcctcgcttgcctgttccttttccacgcattttccaggataacttccttgcttccaggcccgcaatggatgccctgcaactagcaaattcggcttttgcygttgatctgttcaaacaactatgtgaaaaggagccactgggcaatgtcctcttctctccaatctgtctctccacctctctgtcacttgctcaagtgggtg

SEQ ID NO: 4923 - DNA, 201 bp, Homo sapiens
gtttattaaaattctgaattttggggattttcaaaagataatattttacatacactgtatgttatagaacttcatggatcagatctggggcagcaccctahaaatcaacaccttaatatgctgcaacaaaatgtagaatattcagacaaaatggatacataaagactaagtagcccataaggggtcaaaatttgctgccaa

SEQ ID NO: 4924 - DNA, 197 bp, Homo sapiens
cagacacggtcgcctccacatccaggtctttgtgctcctcgcttgcctgttccttttccacgcattttccaggataacttccttgcttccaggccckcaatggatgccctgcaactagcaaattcggcttttgccgttgatctgttcaaacaactatgtgaaaaggagccactgggcaatgtcctcttctctccaat

SEQ ID NO: 4925 - DNA, 201 bp, Homo sapiens
aggttcttcattttgaaaatgtcaaagatgtaccctttggatttcaaacagtaacatcggatgtaaacaaacttagttccttttactcactgaaactaatmaagcggctctacgtagacaaatctctgaatctttctacagagttcatcagctctacgaagagaccgtatgcaaaggaattggaaactgttgacttcaaag

SEQ ID NO: 4926 - DNA, 201 bp, Homo sapiens
aatctgtctctccacctctctgtcacttgctcaagtgggtgctaaaggtgacactgcaaatgaaattggacaggttcttcattttgaaaatgtcaaagatrtaccctttggatttcaaacagtaacatcggatgtaaacaaacttagttccttttactcactgaaactaatcaagcggctctacgtagacaaatctctgaa

SEQ ID NO: 4927 - DNA, 170 bp, Homo sapiens
ttgcaggttcatggattacttctctataaaaaatatgtatttaccaaaaattttgtgacattccttctcccatctcttccttgacctgcattgtaaatagsttcttcttgttctgagattcaatattgaatttttcctatgctattgacaataaaatattattgaactac

SEQ ID NO: 4928 - DNA, 201 bp, Homo sapiens
ggcttgtctggaaaatctagggctgaaacatatcttcagtgaagacacatctgatttctctggaatgtcagagaccaagggagtggccctatcaaatgttrtccacaaagtgtgcttagaaataactgaagatggtggggattccatagaggtgccaggagcacggatcctgcagcacaaggatgaattgaatgctgacca

SEQ ID NO: 4929 - DNA, 201 bp, Homo sapiens
acaaacttagttccttttactcactgaaactaatcaagcggctctacgtagacaaatctctgaatctttctacagagttcatcagctctacgaagagaccstatgcaaaggaattggaaactgttgacttcaaagataaattggaagaaacgaaaggtcagatcaacaactcaattaaggatctcacagatggccactttg

SEQ ID NO: 4930 - DNA, 201 bp, Homo sapiens
ccactttgagaacattttagctgacaacagtgtgaacgaccagaccaaaatccttgtggttaatgctgcctactttgttggcaagtggatgaagaaatttyctgaatcagaaacaaaagaatgtcctttcagagtcaacaagacagacaccaaaccagtgcagatgatgaacatggaggccacgttctgtatgggaaacat

SEQ ID NO: 4931 - DNA, 201 bp, Homo sapiens
gaacgaccagaccaaaatccttgtggttaatgctgcctactttgttggcaagtggatgaagaaattttctgaatcagaaacaaaagaatgtcctttcagastcaacaagacagacaccaaaccagtgcagatgatgaacatggaggccacgttctgtatgggaaacattgacagtatcaattgtaagatcatagagcttcc

SEQ ID NO: 4932 - DNA, 201 bp, Homo sapiens
tctcacagatggcaagccactttgagaacattttagctgacaacagtgtgaacgaccagaccaaaatccttgtggttaatgctgcctactttgttggcaartggatgaagaaattttctgaatcagaaacaaaagaatgtcctttcagagtcaacaagacagacaccaaaccagtgcagatgatgaacatggaggccacgt

SEQ ID NO: 4933 - DNA, 185 bp, Homo sapiens; identical to SEQ ID NO: 4915

SEQ ID NO: 4934 - DNA, 201 bp, Homo sapiens; identical to SEQ ID NO: 4916

SEQ ID NO: 4935 - DNA, 201 bp, Homo sapiens; identical to SEQ ID NO: 4917

SEQ ID NO: 4936 - DNA, 201 bp, Homo sapiens; identical to SEQ ID NO: 4918

SEQ ID NO: 4937 - DNA, 201 bp, Homo sapiens; identical to SEQ ID NO: 4919

SEQ ID NO: 4938 - DNA, 201 bp, Homo sapiens; identical to SEQ ID NO: 4920

SEQ ID NO: 4939 - DNA, 201 bp, Homo sapiens; identical to SEQ ID NO: 4921

SEQ ID NO: 4940 - DNA, 201 bp, Homo sapiens; identical to SEQ ID NO: 4922

SEQ ID NO: 4941 - DNA, 201 bp, Homo sapiens; identical to SEQ ID NO: 4923

SEQ ID NO: 4942 - DNA, 197 bp, Homo sapiens; identical to SEQ ID NO: 4924

SEQ ID NO: 4943 - DNA, 201 bp, Homo sapiens; identical to SEQ ID NO: 4925

SEQ ID NO: 4944 - DNA, 201 bp, Homo sapiens; identical to SEQ ID NO: 4926

SEQ ID NO: 4945 - DNA, 170 bp, Homo sapiens; identical to SEQ ID NO: 4927

SEQ ID NO: 4946 - DNA, 201 bp, Homo sapiens; identical to SEQ ID NO: 4928

SEQ ID NO: 4947 - DNA, 201 bp, Homo sapiens
acaaacttagttccttttactcactgaaactaatcaagcggctctacgtagacaaatctctgaatctttctacagagttcatcagctctacgaagagaccstatgcaaaggaattggaaactgttgacttcaaagataaattggaagaaacgaaaggtcagatcaacaactcaattaaggatctcacagatggcaagccac

SEQ ID NO: 4948 - DNA, 201 bp, Homo sapiens; identical to SEQ ID NO: 4930

SEQ ID NO: 4949 - DNA, 201 bp, Homo sapiens; identical to SEQ ID NO: 4931

SEQ ID NO: 4950 - DNA, 201 bp, Homo sapiens; identical to SEQ ID NO: 4914

SEQ ID NO: 4951 - DNA, 185 bp, Homo sapiens; identical to SEQ ID NO: 4915

SEQ ID NO: 4952 - DNA, 201 bp, Homo sapiens; identical to SEQ ID NO: 4916

SEQ ID NO: 4953 - DNA, 201 bp, Homo sapiens; identical to SEQ ID NO: 4917

SEQ ID NO: 4954 - DNA, 201 bp, Homo sapiens; identical to SEQ ID NO: 4918

SEQ ID NO: 4955 - DNA, 201 bp, Homo sapiens; identical to SEQ ID NO: 4919

SEQ ID NO: 4956 - DNA, 201 bp, Homo sapiens; identical to SEQ ID NO: 4920

SEQ ID NO: 4957 - DNA, 201 bp, Homo sapiens; identical to SEQ ID NO: 4921

SEQ ID NO: 4958 - DNA, 201 bp, Homo sapiens
gtgctcctcgcttgcctgttccttttccacgcattttccaggataactgtgactccaggcccgcaatggatgccctgcaactagcaaattcggcttttgcygttgatctgttcaaacaactatgtgaaaaggagccactgggcaatgtcctcttctctccaatctgtctctccacctctctgtcacttgctcaagtgggtg

SEQ ID NO: 4959 - DNA, 201 bp, Homo sapiens; identical to SEQ ID NO: 4923

SEQ ID NO: 4960 - DNA, 201 bp, Homo sapiens
ttctgcccagacacggtcgcctccacatccaggtctttgtgctcctcgcttgcctgttccttttccacgcattttccaggataactgtgactccaggccckcaatggatgccctgcaactagcaaattcggcttttgccgttgatctgttcaaacaactatgtgaaaaggagccactgggcaatgtcctcttctctccaat

SEQ ID NO: 4961 - DNA, 201 bp, Homo sapiens; identical to SEQ ID NO: 4925

SEQ ID NO: 4962 - DNA, 201 bp, Homo sapiens; identical to SEQ ID NO: 4926

SEQ ID NO: 4963 - DNA, 170 bp, Homo sapiens; identical to SEQ ID NO: 4927

SEQ ID NO: 4964 - DNA, 201 bp, Homo sapiens; identical to SEQ ID NO: 4928

SEQ ID NO: 4965 - DNA, 201 bp, Homo sapiens; identical to SEQ ID NO: 4929

SEQ ID NO: 4966 - DNA, 201 bp, Homo sapiens; identical to SEQ ID NO: 4930

SEQ ID NO: 4967 - DNA, 201 bp, Homo sapiens; identical to SEQ ID NO: 4931

SEQ ID NO: 4968 - DNA, 201 bp, Homo sapiens
tctcacagatggcaagccactttgagaacattttagctgacaacagtgtgaacgaccagaccaaaatccttgtggttaatgctgcctactttgttggcaartggatgaagaaattttctgaatcagaaacaaaagaatgtcctttcagagtcaacaaggtatgtggggcagcatgtagcagtaaaaggagcccaattatag

SEQ ID NO: 4969 - DNA, 201 bp, Homo sapiens; identical to SEQ ID NO: 4947

SEQ ID NO: 4970 - DNA, 201 bp, Homo sapiens
tggttaatgctgcctactttgttggcaagtggatgaagaaattttctgaatcagaaacaaaagaatgtcctttcagagtcaacaaggtatgtggggcagcrtgtagcagtaaaaggagcccaattatagatgtgaaaaatgatagggacagagtggggcataaatccattccaatgaggaacctgagggcacggccggcaa

SEQ ID NO: 4971 - DNA, 201 bp, Homo sapiens
ccactttgagaacattttagctgacaacagtgtgaacgaccagaccaaaatccttgtggttaatgctgcctactttgttggcaagtggatgaagaaatttyctgaatcagaaacaaaagaatgtcctttcagagtcaacaaggtatgtggggcagcatgtagcagtaaaaggagcccaattatagatgtgaaaaatgatag

SEQ ID NO: 4972 - DNA, 170 bp, Homo sapiens
tttctgaatcagaaacaaaagaatgtcctttcagagtcaacaaggtatgtggggcagcatgtagcagtaaaaggagcccaattatagatgtgaaaaatgayagggacagagtggggcataaatccattccaatgaggaacctgagggcacggccggcaaagtgcctttcc

SEQ ID NO: 4973 - DNA, 201 bp, Homo sapiens
gaacgaccagaccaaaatccttgtggttaatgctgcctactttgttggcaagtggatgaagaaattttctgaatcagaaacaaaagaatgtcctttcagastcaacaaggtatgtggggcagcatgtagcagtaaaaggagcccaattatagatgtgaaaaatgatagggacagagtggggcataaatccattccaatgag

SEQ ID NO: 4974 - DNA, 201 bp, Homo sapiens; identical to SEQ ID NO: 4922

SEQ ID NO: 4975 - DNA, 197 bp, Homo sapiens; identical to SEQ ID NO: 4924

SEQ ID NO: 4976 - DNA, 201 bp, Homo sapiens; identical to SEQ ID NO: 4925

SEQ ID NO: 4977 - DNA, 201 bp, Homo sapiens; identical to SEQ ID NO: 4926

SEQ ID NO: 4978 - DNA, 201 bp, Homo sapiens
actgcagagccaggaaaactttgaagccttcatgaaggcaatcggtctgccggaagagctcatccagaaggggaaggatatcaagggggtgtcggaaatcvtgcagaatgggaagcacttcaagttcaccatcaccgctgggtccaaagtgatccaaaacgaattcacggtgggggaggaatgtgagctggagacaatgac

SEQ ID NO: 4979 - DNA, 171 bp, Homo sapiens
aaaaacatcaagtctgtgaccgaactcaacggcgacataatcaccaataccatgacattgggtgacattgtcttcaagagaatcagcaagagaatttaaasaagtctgcatttcatattattttagtgtgtaaaattaatgtaataaagtgaactttgttttaaaaaaaaa

SEQ ID NO: 4980 - DNA, 201 bp, Homo sapiens
aaacgaattcacggtgggggaggaatgtgagctggagacaatgacaggggagaaagtcaagacagtggttcagttggaaggtgacaataaactggtgacarctttcaaaaacatcaagtctgtgaccgaactcaacggcgacataatcaccaataccatgacattgggtgacattgtcttcaagagaatcagcaagagaat

SEQ ID NO: 4981 - DNA, 201 bp, Homo sapiens
ggcaatcggtctgccggaagagctcatccagaaggggaaggatatcaagggggtgtcggaaatcgtgcagaatgggaagcacttcaagttcaccatcaccrctgggtccaaagtgatccaaaacgaattcacggtgggggaggaatgtgagctggagacaatgacaggggagaaagtcaagacagtggttcagttggaagg

SEQ ID NO: 4982 - DNA, 201 bp, Homo sapiens
tgcagagccaggaaaactttgaagccttcatgaaggcaatcggtctgccggaagagctcatccagaaggggaaggatatcaagggggtgtcggaaatcgtkcagaatgggaagcacttcaagttcaccatcaccgctgggtccaaagtgatccaaaacgaattcacggtgggggaggaatgtgagctggagacaatgacag

SEQ ID NO: 4983 - DNA, 131 bp, Homo sapiens
aggggaggtgaagcatggggagcggctcacataccctaatgccacccctccaccctccaacccccaaacttctttcctgtggtcagtatctgccagcactwactgaggatccatcatgtcccaggcagttt

SEQ ID NO: 4984 - DNA, 201 bp, Homo sapiens
tggtcaagggatttaactatgggccttttccaaattttctttttggaggcaaaatgtttaatgttgcccagggtctttggctccctgctgggttcctgtcrtctcttccaggatgtataagggcttggaaggaggccacaatatgaaaagttaacgctctgggaagaataatacatacctggttgggcgggtggctcatgc

SEQ ID NO: 4985 - DNA, 201 bp, Homo sapiens
gcctacaatcccagcactttgggaggctgaagtgaaaggactgtttgagcctaggagttcaagaccagcctgggcaacatagcaagacctcatctcaattaaaaaaaaaaaaaaaagaagaatacataccaaagcaaaatatgtattctctactggtcaatatttgaattttgccactacctccctccattagcttgggag

SEQ ID NO: 4986 - DNA, 201 bp, Homo sapiens
ttagcaaggctcttgccccccaccaccccttcctcacaggtcacctctctgttccctgcagacagtggttcagttggaaggtgacaataaactggtgacarctttcaaaaacatcaagtctgtgaccgaactcaacggcgacataatcaccaatgtaagttggtggtgctctgagcgtgtggctcccagtgcttgagggga

SEQ ID NO: 4987 - DNA, 201 bp, Homo sapiens
ggcaatcggtctgccggaagagctcatccagaaggggaaggatatcaagggggtgtcggaaatcgtgcagaatgggaagcacttcaagttcaccatcaccrctgggtccaaagtgatccaaaacgaattcacggtgggggaggaatgtgagctggagacaatgacaggggagaaagtcaaggtaggagggcatcccttctg

SEQ ID NO: 4988 - DNA, 175 bp, Homo sapiens
gttggtggtgctctgagcgtgtggctcccagtgcttgaggggagaggggaggtgaagcatggggagcggctcacataccctaatgccacccctccaccctycaacccccaaacttctttcctgtggtcagtatctgccagcacttactgaggatccatcatgtcccaggcagttt

SEQ ID NO: 4989 - DNA, 201 bp, Homo sapiens; identical to SEQ ID NO: 4982

SEQ ID NO: 4990 - DNA, 201 bp, Homo sapiens; identical to SEQ ID NO: 4978

SEQ ID NO: 4991 - DNA, 201 bp, Homo sapiens
cccatctggagtgggagtgggcacttccaccccgcccacaggccatccggctgtgcaggccagcccctaggagcaggtcccgggtgactggcagttttcayggtctagggccgagacgatggcatggggcctagagcatgaggtagagcagaatgcagaccacgccgctggatgccgagagaccctgctctccgagggagg

SEQ ID NO: 4992 - DNA, 201 bp, Homo sapiens
tgtgtgttctctttctcgtcaccctggagtggtgactggcatctgtgggtagttcgtctttggtgtgattttctcagcagttctcaacactgtgttcaacrgcccctcgggagccacattgagggagacccaggtgtggtcatggcaagagggtggctgcctgtccctgtcctctggctgccagacagtcagcagttgccc

SEQ ID NO: 4993 - DNA, 201 bp, Homo sapiens
agattgctgaagagtatggcggggtgatggtcagcttcccacgctctggcacacagagcgacaaagtcaccctcaagggcgccaaggactgtgtggaggcrgccaagaaacgcattcaggagatcattgaggacctggaagctcaggtgacattagaatgtgctataccccagaaattccatcgatctgtcatgggcccca

SEQ ID NO: 4994 - DNA, 201 bp, Homo sapiens
tagaccccaaataccatcccaagattatcgggagaaagggggcagtaattacccaaatccggttggagcatgacgtgaacatccagtttcctgataaggaygatgggaaccagccccaggaccaaattaccatcacagggtacgaaaagaacacagaagctgccagggatgctatactgagaattgtgggtgaacttgagc

SEQ ID NO: 4995 - DNA, 201 bp, Homo sapiens
ctctggccggaaagaaaagtgtgaggctgccaaggaagctctggaggcattggttcctgtcaccattgaagtagaggtgccctttgaccttcaccgttacrttattgggcagaaaggaagtgggatccgcaagatgatggatgagtttgaggtgaacatacatgtcccggcacctgagctgcagtctgacatcatcgccat

SEQ ID NO: 4996 - DNA, 201 bp, Homo sapiens
cagaacctggccaaaatcactcagcagatgccaaaggttcacatcgagttcacagagggcgaagacaagatcaccctggagggccctacagaggatgtcartgtggcccaggaacagatagaaggcatggtcaaagatttgattaaccggatggactatgtggagatcaacatcgaccacaagttccacaggcacctcatt

SEQ ID NO: 4997 - DNA, 201 bp, Homo sapiens
gcaccctggaccgccagcagcagtgagaaggctcctgacatgagcagctctgaggaatttcccagctttggggctcaggtggctcccaagaccctcccttkgggccccaaacgataatgatcaaaaagaacagaaccctctccagccagcggctggaccctccgtaaattgttgacgctcttcccccttcccgaggtcccg

SEQ ID NO: 4998 - DNA, 201 bp, Homo sapiens
atttgattaaccggatggactatgtggagatcaacatcgaccacaagttccacaggcacctcattgggaagagcggtgccaacataaacagaatcaaagaycagtacaaggtgtccgtgcgcatccctcctgacagtgagaagagcaatttgatccgcatcgagggggacccacagggcgtgcagcaggccaagcgagagc

SEQ ID NO: 4999 - DNA, 201 bp, Homo sapiens
actcacgcccatccatctcacagcccttccctggggacagtcgcttccgccttgacacctcactctcagttgaataactcaagcttggtcatcttcagackcgaattcttgagtagacccagacggcttagcccaagtctagttgcagctgcctcggcaagtccccatttgctcaggcagccctgaatgggcctgtttaca

SEQ ID NO: 5000 - DNA, 201 bp, Homo sapiens
tcaccctggagtggtgactggcatctgtgggtagttcgtctttggtgtgattttctcagcagttctcaacactgtgttcaacggcccctcgggagccacaytgagggagacccaggtgtggtcatggcaagagggtggctgcctgtccctgtcctctggctgccagacagtcagcagttgccctgcagccctcattgaggg

SEQ ID NO: 5001 - DNA, 201 bp, Homo sapiens
ctgtgtcatgctgtgagggctgaggacggggccctagtctctggttttctggtcttaacatccttatctgtgtccgccacggaggtgactgagctgctagygagttgtcctgtcccaggtacttgagttttggaaaagctgactcacgcccatccatctcacagcccttccctggggacagtcgcttccgccttgacacct

SEQ ID NO: 5002 - DNA, 201 bp, Homo sapiens
cctcggcaagtccccatttgctcaggcagccctgaatgggcctgtttacaggaatggtaaattgggattggaaggaatatagcttccagcttcataggctrgggtgaccacggcttaggaaacagggaaagaaagcaaggcccttttcctgcctttcccgggatctgtctactccacctccacgggggaggccagtgggga

SEQ ID NO: 5003 - DNA, 201 bp, Homo sapiens
ctgaggaatttcccagctttggggctcaggtggctcccaagaccctcccttggggccccaaacgataatgatcaaaaagaacagaaccctctccagccagyggctggaccctccgtaaattgttgacgctcttcccccttcccgaggtcccgcagggagcctagcgcctggctgtgtgtgcggccgctcctccaggcctgg

SEQ ID NO: 5004 - DNA, 201 bp, Homo sapiens
ataatgtggtggaagactccatgctggtggaccccaagcaccaccgccacttcgtcatccgcagaggccaggtcttgcgggagattgctgaagagtatggyggggtgatggtcagcttcccacgctctggcacacagagcgacaaagtcaccctcaagggcgccaaggactgtgtggaggcagccaagaaacgcattcagg

SEQ ID NO: 5005 - DNA, 201 bp, Homo sapiens
aggaatttcccagctttggggctcaggtggctcccaagaccctcccttggggccccaaacgataatgatcaaaaagaacagaaccctctccagcctgctgrcccaaacccaaccacacaatggtttgtctcaatctgacccagcggctggaccctccgtaaattgttgacgctcttcccccttcccgaggtcccgcaggga

SEQ ID NO: 5006 - DNA, 201 bp, Homo sapiens; identical to SEQ ID NO: 4991

SEQ ID NO: 5007 - DNA, 201 bp, Homo sapiens; identical to SEQ ID NO: 4994

SEQ ID NO: 5008 - DNA, 201 bp, Homo sapiens; identical to SEQ ID NO: 4995

SEQ ID NO: 5009 - DNA, 201 bp, Homo sapiens; identical to SEQ ID NO: 4996

SEQ ID NO: 5010 - DNA, 201 bp, Homo sapiens
gcaccctggaccgccagcagcagtgagaaggctcctgacatgagcagctctgaggaatttcccagctttggggctcaggtggctcccaagaccctcccttkgggccccaaacgataatgatcaaaaagaacagaaccctctccagcctgctgacccaaacccaaccacacaatggtttgtctcaatctgacccagcggctg

SEQ ID NO: 5011 - DNA, 201 bp, Homo sapiens; identical to SEQ ID NO: 4999

SEQ ID NO: 5012 - DNA, 201 bp, Homo sapiens; identical to SEQ ID NO: 5001

SEQ ID NO: 5013 - DNA, 201 bp, Homo sapiens; identical to SEQ ID NO: 5002

SEQ ID NO: 5014 - DNA, 201 bp, Homo sapiens; identical to SEQ ID NO: 5004

SEQ ID NO: 5015 - DNA, 142 bp, Homo sapiens
cacctccacgggggaggccagtggggaagggctgtcacctcttccccatctgcatgagttctggaactctgtcctgttggctgcttgcttccagctccccscaatctccatcgcagcgggttcctcctgtcttttctacagt

SEQ ID NO: 5016 - DNA, 125 bp, Homo sapiens
ccagtggggaagggctgtcacctcttccccatctgcatgagttctggaactctgtcctgttggctgcttgcttccagctccccccaatctccatcgcagcrggttcctcctgtcttttctacagt

SEQ ID NO: 5017 - DNA, 201 bp, Homo sapiens; identical to SEQ ID NO: 4993

SEQ ID NO: 5018 - DNA, 201 bp, Homo sapiens
atttcccagctttggggctcaggtggctcccaagaccctcccttggggccccaaacgataatgatcaaaaagaacagaaccctctccagcctgctgacccraacccaaccacacaatggtttgtctcaatctgacccagcggctggaccctccgtaaattgttgacgctcttcccccttcccgaggtcccgcagggagcct

SEQ ID NO: 5019 - DNA, 201 bp, Homo sapiens; identical to SEQ ID NO: 4998

SEQ ID NO: 5020 - DNA, 201 bp, Homo sapiens
ctttggggctcaggtggctcccaagaccctcccttggggccccaaacgataatgatcaaaaagaacagaaccctctccagcctgctgacccaaacccaacyacacaatggtttgtctcaatctgacccagcggctggaccctccgtaaattgttgacgctcttcccccttcccgaggtcccgcagggagcctagcgcctgg

SEQ ID NO: 5021 - DNA, 201 bp, Homo sapiens
cccttggggccccaaacgataatgatcaaaaagaacagaaccctctccagcctgctgacccaaacccaaccacacaatggtttgtctcaatctgacccagyggctggaccctccgtaaattgttgacgctcttcccccttcccgaggtcccgcagggagcctagcgcctggctgtgtgtgcggccgctcctccaggcctgg

SEQ ID NO: 5022 - DNA, 201 bp, Homo sapiens; identical to SEQ ID NO: 5005

SEQ ID NO: 5023 - DNA, 201 bp, Homo sapiens; identical to SEQ ID NO: 4991

SEQ ID NO: 5024 - DNA, 201 bp, Homo sapiens; identical to SEQ ID NO: 4994

SEQ ID NO: 5025 - DNA, 201 bp, Homo sapiens; identical to SEQ ID NO: 4995

SEQ ID NO: 5026 - DNA, 201 bp, Homo sapiens; identical to SEQ ID NO: 4996

SEQ ID NO: 5027 - DNA, 201 bp, Homo sapiens; identical to SEQ ID NO: 5010

SEQ ID NO: 5028 - DNA, 201 bp, Homo sapiens; identical to SEQ ID NO: 4999

SEQ ID NO: 5029 - DNA, 201 bp, Homo sapiens; identical to SEQ ID NO: 5001

SEQ ID NO: 5030 - DNA, 201 bp, Homo sapiens; identical to SEQ ID NO: 5002

SEQ ID NO: 5031 - DNA, 201 bp, Homo sapiens; identical to SEQ ID NO: 5004

SEQ ID NO: 5032 - DNA, 142 bp, Homo sapiens; identical to SEQ ID NO: 5015

SEQ ID NO: 5033 - DNA, 125 bp, Homo sapiens; identical to SEQ ID NO: 5016

SEQ ID NO: 5034 - DNA, 201 bp, Homo sapiens; identical to SEQ ID NO: 4993

SEQ ID NO: 5035 - DNA, 201 bp, Homo sapiens; identical to SEQ ID NO: 5018

SEQ ID NO: 5036 - DNA, 201 bp, Homo sapiens; identical to SEQ ID NO: 4998

SEQ ID NO: 5037 - DNA, 201 bp, Homo sapiens; identical to SEQ ID NO: 5020

SEQ ID NO: 5038 - DNA, 201 bp, Homo sapiens; identical to SEQ ID NO: 5021

SEQ ID NO: 5039 - DNA, 201 bp, Homo sapiens
tgaaatcagaggaccaaagtacagatggaaaccatttcctacatcacaaaaacccaagtttacagcttgtactttactttaatgtgtaatactcaactcamggtacaagacaattgcatttaacattgttataaataaaaggaacatcagatcaatcattaagggctccagagtgaacagcatcttcataacttccatgtt

SEQ ID NO: 5040 - DNA, 201 bp, Homo sapiens
tagaagccatgtccaagctaaagccttactttcttactgatggaacgggaacagtcaccccagccaatgcttcaggaataaatgatggtgctgcagctgtygttcttatgaagaagtcagaagctgataaacgtgggcttacacctttagcacggatagtttcctggtcccaagtgggtgtggagccttccattatgggaa

SEQ ID NO: 5041 - DNA, 201 bp, Homo sapiens
ccaagacgtcaagtcggggaactccaacattggggtgtccagaaacactggggtttcaggcgctctgtaaatgcgtccgaggtccgcggttctgcccgcargcccagaccccggcctcacttccgccccgcgccccgcgccccggcctcacgtcccgcccgcggcaggcctgtgggctgcgaggaggagctttgcctagct

SEQ ID NO: 5042 - DNA, 201 bp, Homo sapiens
ctgatggaacgggaacagtcaccccagccaatgcttcaggaataaatgatggtgctgcagctgtcgttcttatgaagaagtcagaagctgataaacgtggrcttacacctttagcacggatagtttcctggtcccaagtgggtgtggagccttccattatgggaataggaccaattccagccataaagcaagctgttacaa

SEQ ID NO: 5043 - DNA, 201 bp, Homo sapiens
aatattgaaggaggggctatagccttgggccaccctcttggagcatctggctgtcgaattcttgtgaccctgttacacacactggagagaatgggcagaartcgtggtgttgcagccctgtgcattgggggtgggatgggaatagcaatgtgtgttcagagagaatgaattgcttaaactttgaacaacctcaatttcttt

SEQ ID NO: 5044 - DNA, 201 bp, Homo sapiens
cgtgggattccagtcctgagctgaacgagagataagtctttgtcaccccccagtctttactgtttcgagaaaccctaagattttttaaaaaaaagcccaaracgtcaagtcggggaactccaacattggggtgtccagaaacactggggtttcaggcgctctgtaaatgcgtccgaggtccgcggttctgcccgcaagccc

SEQ ID NO: 5045 - DNA, 193 bp, Homo sapiens
ttacagcttgtactttactttaatgtgtaatactcaactcaaggtacaagacaattgcatttaacattgttataaataaaaggaacatcagatcaatcatwaagggctccagagtgaacagcatcttcataacttccatgtttatcatctttactttctggatgtaatttaataagatcatcaattcgaagaa

SEQ ID NO: 5046 - DNA, 201 bp, Homo sapiens
caggacaaggttgcagttctgtcccagaacaggacagagaatgcacagaaagctggccattttgacaaagagattgtaccagttttggtgtcaactagaaraggtcttattgaagttaaaacagatgagtttcctcgccatgggagcaacatagaagccatgtccaagctaaagccttactttcttactgatggaacggga

SEQ ID NO: 5047 - DNA, 194 bp, Homo sapiens
tttacagcttgtactttactttaatgtgtaatactcaactcaaggtacaagacaattgcatttaacattgttataaataaaaggaacatcagatcaatcawtaagggctccagagtgaacagcatcttcataacttccatgtttatcatctttactttctggatgtaatttaataagatcatcaattcgaagaa

SEQ ID NO: 5048 - DNA, 201 bp, Homo sapiens
tacagatggaaaccatttcctacatcacaaaaacccaagtttacagcttgtactttactttaatgtgtaatactcaactcaaggtacaagacaattgcatytaacattgttataaataaaaggaacatcagatcaatcattaagggctccagagtgaacagcatcttcataacttccatgtttatcatctttactttctgg

SEQ ID NO: 5049 - DNA, 201 bp, Homo sapiens
gcccctcacgcgagcgaatgactggcgccaggagaaacgcataggacctcccgaagccgccgagagcaaaaggacccatcagagctgtgctgagacccgcygcgggccgggctcgcactcgagattctcgcccgtgggattccagtcctgagctgaacgagagataagtctttgtcaccccccagtctttactgtttcgag

SEQ ID NO: 5050 - DNA, 201 bp, Homo sapiens; identical to SEQ ID NO: 5039

SEQ ID NO: 5051 - DNA, 201 bp, Homo sapiens; identical to SEQ ID NO: 5040

SEQ ID NO: 5052 - DNA, 201 bp, Homo sapiens; identical to SEQ ID NO: 5041

SEQ ID NO: 5053 - DNA, 201 bp, Homo sapiens; identical to SEQ ID NO: 5042

SEQ ID NO: 5054 - DNA, 201 bp, Homo sapiens; identical to SEQ ID NO: 5043

SEQ ID NO: 5055 - DNA, 201 bp, Homo sapiens; identical to SEQ ID NO: 5044

SEQ ID NO: 5056 - DNA, 201 bp, Homo sapiens
ttacagcttgtactttactttaatgtgtaatactcaactcaaggtacaagacaattgcatttaacattgttataaataaaaggaacatcagatcaatcatwaagggctccagagtgaacagcatcttcataacttccatgtttatcatctttactttctggcattttagatttttacgttctgggttaacctgggcctcat

SEQ ID NO: 5057 - DNA, 201 bp, Homo sapiens; identical to SEQ ID NO: 5046

SEQ ID NO: 5058 - DNA, 201 bp, Homo sapiens
tttacagcttgtactttactttaatgtgtaatactcaactcaaggtacaagacaattgcatttaacattgttataaataaaaggaacatcagatcaatcawtaagggctccagagtgaacagcatcttcataacttccatgtttatcatctttactttctggcattttagatttttacgttctgggttaacctgggcctca

SEQ ID NO: 5059 - DNA, 201 bp, Homo sapiens; identical to SEQ ID NO: 5048

SEQ ID NO: 5060 - DNA, 201 bp, Homo sapiens; identical to SEQ ID NO: 5049

SEQ ID NO: 5061 - DNA, 201 bp, Homo sapiens; identical to SEQ ID NO: 5039

SEQ ID NO: 5062 - DNA, 201 bp, Homo sapiens; identical to SEQ ID NO: 5040

SEQ ID NO: 5063 - DNA, 201 bp, Homo sapiens; identical to SEQ ID NO: 5042

SEQ ID NO: 5064 - DNA, 201 bp, Homo sapiens; identical to SEQ ID NO: 5043

SEQ ID NO: 5065 - DNA, 193 bp, Homo sapiens; identical to SEQ ID NO: 5045

SEQ ID NO: 5066 - DNA, 201 bp, Homo sapiens; identical to SEQ ID NO: 5046

SEQ ID NO: 5067 - DNA, 194 bp, Homo sapiens; identical to SEQ ID NO: 5047

SEQ ID NO: 5068 - DNA, 201 bp, Homo sapiens; identical to SEQ ID NO: 5048

SEQ ID NO: 5069 - DNA, 201 bp, Homo sapiens
accagagcgttcacggtgagcatgaaaggcagccgcgtggagcgcgcggaagaggcacttgcccacatgggcagctccgtgttcagtggaatcacacttasaaaatttggagggattgtggtgttggcttttgccaaatctcaaattttccagatattctacttcaggatgtatttggccatggtcttactgggagccact

SEQ ID NO: 5070 - DNA, 201 bp, Homo sapiens
tttctggtgaccatggtcctcctgggctgtgagctctggtctgcagtcatcatgtgtgccaccatcgccatggtcttggtcaacatgtttggagttatgtrgctctggggcatcagtctgaacgctgtatccttggtcaacctggtgatgagctgtggcatctccgtggagttctgcagccacataaccagagcgttcacg

SEQ ID NO: 5071 - DNA, 201 bp, Homo sapiens
atatttctggtgaccatggtcctcctgggctgtgagctctggtctgcagtcatcatgtgtgccaccatcgccatggtcttggtcaacatgtttggagttaygtggctctggggcatcagtctgaacgctgtatccttggtcaacctggtgatgagctgtggcatctccgtggagttctgcagccacataaccagagcgttc

SEQ ID NO: 5072 - DNA, 201 bp, Homo sapiens
ttctgcagttaacatcctccttggccatggcaccagggtcggagccacgtacttcatgacctaccacaccgtgctgcagacctctgctgactttattgacrctctgaagaaagcccgacttatagccagtaatgtcaccgaaaccatgggcattaacggcagtgcctaccgagtatttccttacagtgtgttttatgtctt

SEQ ID NO: 5073 - DNA, 201 bp, Homo sapiens
tgggctgtgagctctggtctgcagtcatcatgtgtgccaccatcgccatggtcttggtcaacatgtttggagttatgtggctctggggcatcagtctgaaygctgtatccttggtcaacctggtgatgagctgtggcatctccgtggagttctgcagccacataaccagagcgttcacggtgagcatgaaaggcagccgcg

SEQ ID NO: 5074 - DNA, 201 bp, Homo sapiens
cagtgtgttttatgtcttctacgaacagtacctgaccatcattgacgacactatcttcaacctcggtgtgtccctgggcgcgatatttctggtgaccatgktcctcctgggctgtgagctctggtctgcagtcatcatgtgtgccaccatcgccatggtcttggtcaacatgtttggagttatgtggctctggggcatcag

SEQ ID NO: 5075 - DNA, 201 bp, Homo sapiens
ttgaagatgaactaaatcgtgaaagtgacagtgatgtcttcaccgttgtaattagctatgccatcatgtttctatatatttccctagccttggggcacatsaaaagctgtcgcaggcttctggtggattcgaaggtctcactaggcatcgcgggcatcttgatcgtgctgagctcggtggcttgctccttgggtgtcttca

SEQ ID NO: 5076 - DNA, 201 bp, Homo sapiens
agtagatattggattggatcagtctctttcgatgccagatgactcctacatggtggattatttcaaatccatcagtcagtacctgcatgcgggtccgcctrtgtactttgtcctggaggaagggcacgactacacttcttccaaggggcagaacatggtgtgcggcggcatgggctgcaacaatgattccctggtgcagca

SEQ ID NO: 5077 - DNA, 201 bp, Homo sapiens
actgcaccaggttcttgacttacaaatagccatcgaaaacattactgcctcttatgacaatgagactgtgacacttcaagacatctgcttggcccctcttycaccgtataacacgaactgcaccattttgagtgtgttaaattacttccagaacagccattccgtgctggaccacaagaaaggggacgacttctttgtgta

SEQ ID NO: 5078 - DNA, 201 bp, Homo sapiens
ttcctttcggataaccctaaccccaagtgtggcaaagggggacatgctgcctatagttctgcagttaacatcctccttggccatggcaccagggtcggagycacgtacttcatgacctaccacaccgtgctgcagacctctgctgactttattgacgctctgaagaaagcccgacttatagccagtaatgtcaccgaaacc

SEQ ID NO: 5079 - DNA, 201 bp, Homo sapiens
taccatcactcctgtgttttcagattttccagtccatgggatggagcccatgaacaatgccaccaaaggctgtgacgagtctgtggatgaggtcacagcaycatgtagctgccaagactgctctattgtctgtggccccaagccccagcccccacctcctcctgctccctggacgatccttggcttggacgccatgtatgt

SEQ ID NO: 5080 - DNA, 201 bp, Homo sapiens
ctgctcctgctcctccgctcctcctgcgcggggtgctgaaacagcccggggaagtagagccgcctccggggagcccaaccagccgaacgccgccggcgtcmgcagccttgcgcggccacagcatgaccgctcgcggcctggcccttggcctcctcctgctgctactgtgtccagcgcaggtgttttcacagtcctgtgttt

SEQ ID NO: 5081 - DNA, 201 bp, Homo sapiens
  misc_feature (1)...(201): n = A,T,C or G, or insertion/deletion polymorphism (see Tables 1-2)
agtggacaatatcactgaccagttctgcaatgcttcagtggttgaccctgcctgcgttcgctgcaggcctctgactccggaaggcaaacagaggcctcagnggggagacttcatgagattcctgcccatgttcctttcggataaccctaaccccaagtgtggcaaagggggacatgctgcctatagttctgcagttaacat

SEQ ID NO: 5082 - DNA, 201 bp, Homo sapiens
gttacaatactacgtcggacagagttttgccaatgcaatgtacaatgcctgccgggatgtggaggccccctcaagtaatgacaaggccctgggactcctgkgtgggaaggacgctgacgcctgtaatgccaccaactggattgaatacatgttcaataaggacaatggacaggcaccttttaccatcactcctgtgttttc

SEQ ID NO: 5083 - DNA, 201 bp, Homo sapiens
acagtcgtcttgctgtcgagtggacaatatcactgaccagttctgcaatgcttcagtggttgaccctgcctgcgttcgctgcaggcctctgactccggaargcaaacagaggcctcaggggggagacttcatgagattcctgcccatgttcctttcggataaccctaaccccaagtgtggcaaagggggacatgctgccta

SEQ ID NO: 5084 - DNA, 201 bp, Homo sapiens
tgattccctggtgcagcagatatttaacgcggcgcagctggacaactatacccgaataggcttcgccccctcgtcctggatcgacgattatttcgactggrtgaagccacagtcgtcttgctgtcgagtggacaatatcactgaccagttctgcaatgcttcagtggttgaccctgcctgcgttcgctgcaggcctctgac

SEQ ID NO: 5085 - DNA, 201 bp, Homo sapiens
ctttcggataaccctaaccccaagtgtggcaaagggggacatgctgcctatagttctgcagttaacatcctccttggccatggcaccagggtcggagccaygtacttcatgacctaccacaccgtgctgcagacctctgctgactttattgacgctctgaagaaagcccgacttatagccagtaatgtcaccgaaaccatg

SEQ ID NO: 5086 - DNA, 201 bp, Homo sapiens
aaaaatcggctagacatcttttgctgtgtcagaggtgctgaagatggaacaagcgtccaggcctcagagagctgtttgtttcgcttcttcaaaaactcctrttctccacttctgctaaaggactggatgagaccaattgtgatagcaatatttgtgggtgttctgtcattcagcatcgcagtcctgaacaaagtagatatt

SEQ ID NO: 5087 - DNA, 201 bp, Homo sapiens
gagactgtagcatttttcttaggagcattgtccgtgatgccagccgtgcacaccttctctctctttgcgggattggcagtcttcattgactttcttctgcmgattacctgtttcgtgagtctcttggggttagacattaaacgtcaagagaaaaatcggctagacatcttttgctgtgtcagaggtgctgaagatggaaca

SEQ ID NO: 5088 - DNA, 201 bp, Homo sapiens
gatgtccatcctgtttttataacctactgaacctgttttgtgagctgacatgtagccctcgacagagtcagtttttgaatgttacagctactgaagattaygttgatcctgttacaaaccagacgaaaacaaatgtgaaagagttacaatactacgtcggacagagttttgccaatgcaatgtacaatgcctgccgggatg

SEQ ID NO: 5089 - DNA, 201 bp, Homo sapiens
ccgttcctggtgctggctgttggagtggacaacatcttcattctggtgcaggcctaccagagagatgaacgtcttcaaggggaaaccctggatcagcagcygggcagggtcctaggagaagtggctcccagtatgttcctgtcatccttttctgagactgtagcatttttcttaggagcattgtccgtgatgccagccgtg

SEQ ID NO: 5090 - DNA, 201 bp, Homo sapiens
tagccttggggcacatcaaaagctgtcgcaggcttctggtggattcgaaggtctcactaggcatcgcgggcatcttgatcgtgctgagctcggtggcttgstccttgggtgtcttcagctacattgggttgcccttgaccctcattgtgattgaagtcatcccgttcctggtgctggctgttggagtggacaacatcttca

SEQ ID NO: 5091 - DNA, 201 bp, Homo sapiens
aatctgaccatttccttcactgctgaacgaagtattgaagatgaactaaatcgtgaaagtgacagtgatgtcttcaccgttgtaattagctatgccatcakgtttctatatatttccctagccttggggcacatcaaaagctgtcgcaggcttctggtggattcgaaggtctcactaggcatcgcgggcatcttgatcgtg

SEQ ID NO: 5092 - DNA, 201 bp, Homo sapiens
tacagagaagctccagagggcccaggcctgggaaaaagagtttattaattttgtgaaaaactacaagaatcccaatctgaccatttccttcactgctgaaygaagtattgaagatgaactaaatcgtgaaagtgacagtgatgtcttcaccgttgtaattagctatgccatcatgtttctatatatttccctagccttggg

SEQ ID NO: 5093 - DNA, 201 bp, Homo sapiens
acacttacaaaatttggagggattgtggtgttggcttttgccaaatctcaaattttccagatattctacttcaggatgtatttggccatggtcttactggragccactcacggattaatatttctccctgtcttactcagttacatagggccatcagtaaataaagccaaaagttgtgccactgaagagcgatacaaagga

SEQ ID NO: 5094 - DNA, 201 bp, Homo sapiens
gcttcagacactaaaagacaacctgcagctgcctctacagtttctgtccagatgtccatcctgtttttataacctactgaacctgttttgtgagctgacaygtagccctcgacagagtcagtttttgaatgttacagctactgaagattatgttgatcctgttacaaaccagacgaaaacaaatgtgaaagagttacaata

SEQ ID NO: 5095 - DNA, 201 bp, Homo sapiens
cagctggacaactatacccgaataggcttcgccccctcgtcctggatcgacgattatttcgactgggtgaagccacagtcgtcttgctgtcgagtggacartatcactgaccagttctgcaatgcttcagtggttgaccctgcctgcgttcgctgcaggcctctgactccggaaggcaaacagaggcctcaggggggagac

SEQ ID NO: 5096 - DNA, 201 bp, Homo sapiens
caacaatgattccctggtgcagcagatatttaacgcggcgcagctggacaactatacccgaataggcttcgccccctcgtcctggatcgacgattatttcractgggtgaagccacagtcgtcttgctgtcgagtggacaatatcactgaccagttctgcaatgcttcagtggttgaccctgcctgcgttcgctgcaggcc

SEQ ID NO: 5097 - DNA, 201 bp, Homo sapiens
gtgagtctcttggggttagacattaaacgtcaagagaaaaatcggctagacatcttttgctgtgtcagaggtgctgaagatggaacaagcgtccaggcctsagagagctgtttgtttcgcttcttcaaaaactcctattctccacttctgctaaaggactggatgagaccaattgtgatagcaatatttgtgggtgttctg

SEQ ID NO: 5098 - DNA, 201 bp, Homo sapiens
aatgatacagagaagctccagagggcccaggcctgggaaaaagagtttattaattttgtgaaaaactacaagaatcccaatctgaccatttccttcactgytgaacgaagtattgaagatgaactaaatcgtgaaagtgacagtgatgtcttcaccgttgtaattagctatgccatcatgtttctatatatttccctagcc

SEQ ID NO: 5099 - DNA, 201 bp, Homo sapiens
gtccgggtcacaaccaatccagttgacctctggtcagcccccagcagccaggctcgcctggaaaaagagtactttgaccagcactttgggcctttcttccrgacggagcagctcatcatccgggcccctctcactgacaaacacatttaccagccatacccttcgggagctgatgtaccctttggacctccgcttgacata

SEQ ID NO: 5100 - DNA, 201 bp, Homo sapiens
ttctgcgtccgaaaccctggctgtgtcattttcttctcgctggtcttcattactgcgtgttcgtcaggcctggtgtttgtccgggtcacaaccaatccagytgacctctggtcagcccccagcagccaggctcgcctggaaaaagagtactttgaccagcactttgggcctttcttccggacggagcagctcatcatccgg

SEQ ID NO: 5101 - DNA, 201 bp, Homo sapiens
actgaccagttctgcaatgcttcagtggttgaccctgcctgcgttcgctgcaggcctctgactccggaaggcaaacagaggcctcaggggggagacttcakgagattcctgcccatgttcctttcggataaccctaaccccaagtgtggcaaagggggacatgctgcctatagttctgcagttaacatcctccttggccat

SEQ ID NO: 5102 - DNA, 201 bp, Homo sapiens
ctattctccacttctgctaaaggactggatgagaccaattgtgatagcaatatttgtgggtgttctgtcattcagcatcgcagtcctgaacaaagtagatrttggattggatcagtctctttcgatgccagatgactcctacatggtggattatttcaaatccatcagtcagtacctgcatgcgggtccgcctgtgtactt

SEQ ID NO: 5103 - DNA, 201 bp, Homo sapiens
actacacttcttccaaggggcagaacatggtgtgcggcggcatgggctgcaacaatgattccctggtgcagcagatatttaacgcggcgcagctggacaaytatacccgaataggcttcgccccctcgtcctggatcgacgattatttcgactgggtgaagccacagtcgtcttgctgtcgagtggacaatatcactgacc

SEQ ID NO: 5104 - DNA, 201 bp, Homo sapiens
gcctttcttccggacggagcagctcatcatccgggcccctctcactgacaaacacatttaccagccatacccttcgggagctgatgtaccctttggacctycgcttgacatacagatactgcaccaggttcttgacttacaaatagccatcgaaaacattactgcctcttatgacaatgagactgtgacacttcaagacat

SEQ ID NO: 5105 - DNA, 201 bp, Homo sapiens
aaggcagccgcgtggagcgcgcggaagaggcacttgcccacatgggcagctccgtgttcagtggaatcacacttacaaaatttggagggattgtggtgttsgcttttgccaaatctcaaattttccagatattctacttcaggatgtatttggccatggtcttactgggagccactcacggattaatatttctccctgtct

SEQ ID NO: 5106 - DNA, 201 bp, Homo sapiens
gtgcaggaactctgtccaggattcttctttggcaatgtcagtctctgttgtgatgttcggcagcttcagacactaaaagacaacctgcagctgcctctacrgtttctgtccagatgtccatcctgtttttataacctactgaacctgttttgtgagctgacatgtagccctcgacagagtcagtttttgaatgttacagct

SEQ ID NO: 5107 - DNA, 201 bp, Homo sapiens
tgtgggaaggacgctgacgcctgtaatgccaccaactggattgaatacatgttcaataaggacaatggacaggcaccttttaccatcactcctgtgttttmagattttccagtccatgggatggagcccatgaacaatgccaccaaaggctgtgacgagtctgtggatgaggtcacagcaccatgtagctgccaagactgc

SEQ ID NO: 5108 - DNA, 201 bp, Homo sapiens
tgcaccattttgagtgtgttaaattacttccagaacagccattccgtgctggaccacaagaaaggggacgacttctttgtgtatgccgattaccacacgcrctttctgtactgcgtacgggctcctgcctctctgaatgatacaagtttgctccatgacccttgtctgggtacgtttggtggaccagtgttcccgtggctt

SEQ ID NO: 5109 - DNA, 201 bp, Homo sapiens
gttaaattacttccagaacagccattccgtgctggaccacaagaaaggggacgacttctttgtgtatgccgattaccacacgcactttctgtactgcgtaygggctcctgcctctctgaatgatacaagtttgctccatgacccttgtctgggtacgtttggtggaccagtgttcccgtggcttgtgttgggaggctatga

SEQ ID NO: 5110 - DNA, 201 bp, Homo sapiens
tgctccttgggtgtcttcagctacattgggttgcccttgaccctcattgtgattgaagtcatcccgttcctggtgctggctgttggagtggacaacatctycattctggtgcaggcctaccagagagatgaacgtcttcaaggggaaaccctggatcagcagctgggcagggtcctaggagaagtggctcccagtatgttc

SEQ ID NO: 5111 - DNA, 201 bp, Homo sapiens
atatttgtgggtgttctgtcattcagcatcgcagtcctgaacaaagtagatattggattggatcagtctctttcgatgccagatgactcctacatggtggwttatttcaaatccatcagtcagtacctgcatgcgggtccgcctgtgtactttgtcctggaggaagggcacgactacacttcttccaaggggcagaacatg

SEQ ID NO: 5112 - DNA, 201 bp, Homo sapiens
gaagggcacgactacacttcttccaaggggcagaacatggtgtgcggcggcatgggctgcaacaatgattccctggtgcagcagatatttaacgcggcgcmgctggacaactatacccgaataggcttcgccccctcgtcctggatcgacgattatttcgactgggtgaagccacagtcgtcttgctgtcgagtggacaat

SEQ ID NO: 5113 - DNA, 201 bp, Homo sapiens
actaaaagacaacctgcagctgcctctacagtttctgtccagatgtccatcctgtttttataacctactgaacctgttttgtgagctgacatgtagccctygacagagtcagtttttgaatgttacagctactgaagattatgttgatcctgttacaaaccagacgaaaacaaatgtgaaagagttacaatactacgtcgg

SEQ ID NO: 5114 - DNA, 201 bp, Homo sapiens
gacgcctgtaatgccaccaactggattgaatacatgttcaataaggacaatggacaggcaccttttaccatcactcctgtgttttcagattttccagtccrtgggatggagcccatgaacaatgccaccaaaggctgtgacgagtctgtggatgaggtcacagcaccatgtagctgccaagactgctctattgtctgtggc

SEQ ID NO: 5115 - DNA, 201 bp, Homo sapiens
cagcagatatttaacgcggcgcagctggacaactatacccgaataggcttcgccccctcgtcctggatcgacgattatttcgactgggtgaagccacagtygtcttgctgtcgagtggacaatatcactgaccagttctgcaatgcttcagtggttgaccctgcctgcgttcgctgcaggcctctgactccggaaggcaaa

SEQ ID NO: 5116 - DNA, 201 bp, Homo sapiens
gaaaggcagccgcgtggagcgcgcggaagaggcacttgcccacatgggcagctccgtgttcagtggaatcacacttacaaaatttggagggattgtggtgktggcttttgccaaatctcaaattttccagatattctacttcaggatgtatttggccatggtcttactgggagccactcacggattaatatttctccctgt

SEQ ID NO: 5117 - DNA, 201 bp, Homo sapiens
gttctgcagccacataaccagagcgttcacggtgagcatgaaaggcagccgcgtggagcgcgcggaagaggcacttgcccacatgggcagctccgtgttcrgtggaatcacacttacaaaatttggagggattgtggtgttggcttttgccaaatctcaaattttccagatattctacttcaggatgtatttggccatggt

SEQ ID NO: 5118 - DNA, 201 bp, Homo sapiens
aatggacaggcaccttttaccatcactcctgtgttttcagattttccagtccatgggatggagcccatgaacaatgccaccaaaggctgtgacgagtctgkggatgaggtcacagcaccatgtagctgccaagactgctctattgtctgtggccccaagccccagcccccacctcctcctgctccctggacgatccttggc

SEQ ID NO: 5119 - DNA, 201 bp, Homo sapiens
aatttggagggattgtggtgttggcttttgccaaatctcaaattttccagatattctacttcaggatgtatttggccatggtcttactgggagccactcayggattaatatttctccctgtcttactcagttacatagggccatcagtaaataaagccaaaagttgtgccactgaagagcgatacaaaggaacagagcgcg

SEQ ID NO: 5120 - DNA, 201 bp, Homo sapiens
gggcatcagtctgaacgctgtatccttggtcaacctggtgatgagctgtggcatctccgtggagttctgcagccacataaccagagcgttcacggtgagcrtgaaaggcagccgcgtggagcgcgcggaagaggcacttgcccacatgggcagctccgtgttcagtggaatcacacttacaaaatttggagggattgtggt

SEQ ID NO: 5121 - DNA, 201 bp, Homo sapiens
gtcttcaaggggaaaccctggatcagcagctgggcagggtcctaggagaagtggctcccagtatgttcctgtcatccttttctgagactgtagcatttttyttaggagcattgtccgtgatgccagccgtgcacaccttctctctctttgcgggattggcagtcttcattgactttcttctgcagattacctgtttcgtga

SEQ ID NO: 5122 - DNA, 201 bp, Homo sapiens
atccatcagtcagtacctgcatgcgggtccgcctgtgtactttgtcctggaggaagggcacgactacacttcttccaaggggcagaacatggtgtgcggcrgcatgggctgcaacaatgattccctggtgcagcagatatttaacgcggcgcagctggacaactatacccgaataggcttcgccccctcgtcctggatcga

SEQ ID NO: 5123 - DNA, 201 bp, Homo sapiens
acaaagtagatattggattggatcagtctctttcgatgccagatgactcctacatggtggattatttcaaatccatcagtcagtacctgcatgcgggtccrcctgtgtactttgtcctggaggaagggcacgactacacttcttccaaggggcagaacatggtgtgcggcggcatgggctgcaacaatgattccctggtgc

SEQ ID NO: 5124 - DNA, 201 bp, Homo sapiens
tggtgttggcttttgccaaatctcaaattttccagatattctacttcaggatgtatttggccatggtcttactgggagccactcacggattaatatttctycctgtcttactcagttacatagggccatcagtaaataaagccaaaagttgtgccactgaagagcgatacaaaggaacagagcgcgaacggcttctaaatt

SEQ ID NO: 5125 - DNA, 201 bp, Homo sapiens
agctgccaagactgctctattgtctgtggccccaagccccagcccccacctcctcctgctccctggacgatccttggcttggacgccatgtatgtcatcakgtggatcacctacatggcgtttttgcttgtgttttttggagcattttttgcagtgtggtgctacagaaaacggtattttgtctccgagtacactcccatc

SEQ ID NO: 5126 - DNA, 201 bp, Homo sapiens
gtcttactgggagccactcacggattaatatttctccctgtcttactcagttacatagggccatcagtaaataaagccaaaagttgtgccactgaagagcratacaaaggaacagagcgcgaacggcttctaaatttctagccctctcgcagggcatcctgactgaactgtgtctaagggtcggtcggtttaccactggac

SEQ ID NO: 5127 - DNA, 201 bp, Homo sapiens
gttttcagattttccagtccatgggatggagcccatgaacaatgccaccaaaggctgtgacgagtctgtggatgaggtcacagcaccatgtagctgccaasactgctctattgtctgtggccccaagccccagcccccacctcctcctgctccctggacgatccttggcttggacgccatgtatgtcatcatgtggatcac

SEQ ID NO: 5128 - DNA, 201 bp, Homo sapiens
ttacaatactacgtcggacagagttttgccaatgcaatgtacaatgcctgccgggatgtggaggccccctcaagtaatgacaaggccctgggactcctgtrtgggaaggacgctgacgcctgtaatgccaccaactggattgaatacatgttcaataaggacaatggacaggcaccttttaccatcactcctgtgttttca

SEQ ID NO: 5129 - DNA, 201 bp, Homo sapiens
ggccatggcaccagggtcggagccacgtacttcatgacctaccacaccgtgctgcagacctctgctgactttattgacgctctgaagaaagcccgacttayagccagtaatgtcaccgaaaccatgggcattaacggcagtgcctaccgagtatttccttacagtgtgttttatgtcttctacgaacagtacctgaccatc

SEQ ID NO: 5130 - DNA, 201 bp, Homo sapiens
gtgaccctgtcagcgcagcatttgagggctgcttgaggcggctgttcacacgctgggggtctttctgcgtccgaaaccctggctgtgtcattttcttctcrctggtcttcattactgcgtgttcgtcaggcctggtgtttgtccgggtcacaaccaatccagttgacctctggtcagcccccagcagccaggctcgcctgg

SEQ ID NO: 5131 - DNA, 201 bp, Homo sapiens
cagtgtggtgctacagaaaacggtattttgtctccgagtacactcccatcgatagcaatatagctttttctgttaatgcaagtgacaaaggagaggcgtcytgctgtgaccctgtcagcgcagcatttgagggctgcttgaggcggctgttcacacgctgggggtctttctgcgtccgaaaccctggctgtgtcattttct

SEQ ID NO: 5132 - DNA, 201 bp, Homo sapiens
atatttaacgcggcgcagctggacaactatacccgaataggcttcgccccctcgtcctggatcgacgattatttcgactgggtgaagccacagtcgtcttrctgtcgagtggacaatatcactgaccagttctgcaatgcttcagtggttgaccctgcctgcgttcgctgcaggcctctgactccggaaggcaaacagagg

SEQ ID NO: 5133 - DNA, 201 bp, Homo sapiens
tcttccaaggggcagaacatggtgtgcggcggcatgggctgcaacaatgattccctggtgcagcagatatttaacgcggcgcagctggacaactatacccraataggcttcgccccctcgtcctggatcgacgattatttcgactgggtgaagccacagtcgtcttgctgtcgagtggacaatatcactgaccagttctgc

SEQ ID NO: 5134 - DNA, 201 bp, Homo sapiens
cgattatttcgactgggtgaagccacagtcgtcttgctgtcgagtggacaatatcactgaccagttctgcaatgcttcagtggttgaccctgcctgcgttygctgcaggcctctgactccggaaggcaaacagaggcctcaggggggagacttcatgagattcctgcccatgttcctttcggataaccctaaccccaagtg

SEQ ID NO: 5135 - DNA, 201 bp, Homo sapiens
ctgaagaaagcccgacttatagccagtaatgtcaccgaaaccatgggcattaacggcagtgcctaccgagtatttccttacagtgtgttttatgtcttctrcgaacagtacctgaccatcattgacgacactatcttcaacctcggtgtgtccctgggcgcgatatttctggtgaccatggtcctcctgggctgtgagctc

SEQ ID NO: 5136 - DNA, 201 bp, Homo sapiens
tctgcagtcatcatgtgtgccaccatcgccatggtcttggtcaacatgtttggagttatgtggctctggggcatcagtctgaacgctgtatccttggtcarcctggtgatgagctgtggcatctccgtggagttctgcagccacataaccagagcgttcacggtgagcatgaaaggcagccgcgtggagcgcgcggaagag

SEQ ID NO: 5137 - DNA, 201 bp, Homo sapiens
gatgcactaggagatcggatttttggccttgaagggtcccatgcagaaaacgaaagctcctttgggctggaaatgtctcagattggtttctccactcatcrgctaaaggatgggattctttttgggatggtgggggcctatgactggggaggctctgtgctatggcttgaaggaggccaccgccttttccccccacgaatg

SEQ ID NO: 5138 - DNA, 201 bp, Homo sapiens
tgccaccttgggcagctggcaaaggggactgaggtctctgttggactattgaggctggttcacaatgaatttttccgaagagccaagttcaagtccctgayggtggtcagcacctttgagctgggaaccgaagagggcagtgtcctacagctgactgaagcctcccgttggagtgagagcctcttggaggtggttcagacc

SEQ ID NO: 5139 - DNA, 201 bp, Homo sapiens
gccatcagtgtggttcagagggactgtaggcggcgaggccaagaggcagtctgtctgactgcagccctttgcttccaagtgacctcccgtactcctggtcrctgggatcaccaattctacatgaggttcaccgcatcactggatgaatggactgctggggcacgtgcagcatttgatggctctggccagaggttgtcccct

SEQ ID NO: 5140 - DNA, 201 bp, Homo sapiens
tgcttgctctccttgtcttctgcctgtggaagcttggcttctttgcccataagaaaatccctgaggaagaaaaaagagaagagaagttggagcaatgaatrtagaataagggtctagaaagtcctccctggcagcttcttcaagagacttgcataaaagcagaggtttgggggctcagatgggacaagaagccgcctctgg

SEQ ID NO: 5141 - DNA, 201 bp, Homo sapiens
ctgaggtctctgttggactattgaggctggttcacaatgaatttttccgaagagccaagttcaagtccctgacggtggtcagcacctttgagctgggaacygaagagggcagtgtcctacagctgactgaagcctcccgttggagtgagagcctcttggaggtggttcagacccggcctatcctcatctccctgtggatcc

SEQ ID NO: 5142 - DNA, 201 bp, Homo sapiens
ggtgggggcctatgactggggaggctctgtgctatggcttgaaggaggccaccgccttttccccccacgaatggcactggaagacgagttcccccctgcaytgcagaaccatgcagcctacctgggttactctgtttcttccatgcttttgcggggtggacgccgcctgtttctctctggggctcctcgatttagacatcg

SEQ ID NO: 5143 - DNA, 201 bp, Homo sapiens
ggattgcagtccttggtcactacctccggcggcagcgagatcccagctctttcctgagagaaattagaactattgccagtgatccagatgagcgattcttyttcaatgtcacagatgaggctgctctgactgacattgtggatgcactaggagatcggatttttggccttgaagggtcccatgcagaaaacgaaagctcct

SEQ ID NO: 5144 - DNA, 201 bp, Homo sapiens
tgggatcaccaattctacatgaggttcaccgcatcactggatgaatggactgctggggcacgtgcagcatttgatggctctggccagaggttgtcccctcrgaggctccggctcagtgtggggaatgtcacttgtgagcagctacacttccatgtgctggatacatcagattacctccggccagtggccttgactgtgacc

SEQ ID NO: 5145 - DNA, 201 bp, Homo sapiens
gggggcagccatcctgctcagctcccggcccattgtccatctgaccccatcactggaggtgaccccacaggccatcagtgtggttcagagggactgtaggyggcgaggccaagaggcagtctgtctgactgcagccctttgcttccaagtgacctcccgtactcctggtcgctgggatcaccaattctacatgaggttcac

SEQ ID NO: 5146 - DNA, 201 bp, Homo sapiens
gcgaggccaagaggcagtctgtctgactgcagccctttgcttccaagtgacctcccgtactcctggtcgctgggatcaccaattctacatgaggttcaccrcatcactggatgaatggactgctggggcacgtgcagcatttgatggctctggccagaggttgtcccctcggaggctccggctcagtgtggggaatgtcac

SEQ ID NO: 5147 - DNA, 201 bp, Homo sapiens; identical to SEQ ID NO: 5137

SEQ ID NO: 5148 - DNA, 201 bp, Homo sapiens; identical to SEQ ID NO: 5138

SEQ ID NO: 5149 - DNA, 201 bp, Homo sapiens; identical to SEQ ID NO: 5139

SEQ ID NO: 5150 - DNA, 201 bp, Homo sapiens
ttgatgcttactggaaatctccaggttaatttctatctctgatccctccccaacccactccatatttgggtcatggacagtaaaggcagttggattctcayagacaactgggtaacttatatttctttgtaatcaagacttgagatatcgaagtcagttattggtctccagagtgcagctctgggagccttttgaagaatc

SEQ ID NO: 5151 - DNA, 201 bp, Homo sapiens; identical to SEQ ID NO: 5141

SEQ ID NO: 5152 - DNA, 201 bp, Homo sapiens; identical to SEQ ID NO: 5142

SEQ ID NO: 5153 - DNA, 201 bp, Homo sapiens; identical to SEQ ID NO: 5143

SEQ ID NO: 5154 - DNA, 201 bp, Homo sapiens; identical to SEQ ID NO: 5144

SEQ ID NO: 5155 - DNA, 201 bp, Homo sapiens; identical to SEQ ID NO: 5145

SEQ ID NO: 5156 - DNA, 201 bp, Homo sapiens; identical to SEQ ID NO: 5146

SEQ ID NO: 5157 - DNA, 201 bp, Homo sapiens
ctgactcaggcgcctggcacatttcagggagaaactccaaagtccacacaaagattttctaaggaatgcacaaattgaaaacacactcaaaagacaaacakgcaagtaaagaaaaaaaaaagaaagacttttgtttaaatttgtaaaatgcaaaactgaatgaaactgttactaccataaatcaggatatgtttcatgaat

SEQ ID NO: 5158 - DNA, 201 bp, Homo sapiens
aaatcagaagaagttcagaggaacacctaagacaaaccaggtcggagaccatgagaaacagcgtcaaatcatcttttcatgatcccaagctgaaaggcaakccctccagagagcgttatgtgacccacaaccgagcacattggtgacagaccttcggggcctgtctgaagccatagcctccacggagagccctgtggccga

SEQ ID NO: 5159 - DNA, 201 bp, Homo sapiens
aaaaaagatcattaaatcaggagattccctgtccttgatttttggagacacaatggtatagggttgtttatgaaatatattgaaaagtaagtgtttgttaygctttaaagcagtaaaattattttcctttatataaccggctaatgaaagaggttggattgaattttgatgtacttatttttttatagatatttatattca

SEQ ID NO: 5160 - DNA, 201 bp, Homo sapiens
gggtcaacactcccgagcacgttgttccgtatggacttggaagccctaggtccaagagagccttggagaatttacttcccacaaaggcaacagaccgtgaraatagatgccaatgtgctagccaaaaagacaagaagtgctggaatttttgccaagcaggaaaagaactcagggctgaagacattatggagaaagactgga

SEQ ID NO: 5161 - DNA, 201 bp, Homo sapiens; identical to SEQ ID NO: 5157

SEQ ID NO: 5162 - DNA, 201 bp, Homo sapiens; identical to SEQ ID NO: 5158

SEQ ID NO: 5163 - DNA, 201 bp, Homo sapiens; identical to SEQ ID NO: 5159

SEQ ID NO: 5164 - DNA, 201 bp, Homo sapiens; identical to SEQ ID NO: 5160

SEQ ID NO: 5165 - DNA, 108 bp, Homo sapiens
ctgactggcaaaggaccagcgtcctcgttcaaaactccaaagtccacacaaagattttctaaggaatgcacaaattgaaaacacactcaaaagacaaacakgcaagta

SEQ ID NO: 5166 - DNA, 201 bp, Homo sapiens; identical to SEQ ID NO: 5158

SEQ ID NO: 5167 - DNA, 201 bp, Homo sapiens; identical to SEQ ID NO: 5157

SEQ ID NO: 5168 - DNA, 201 bp, Homo sapiens; identical to SEQ ID NO: 5158

SEQ ID NO: 5169 - DNA, 201 bp, Homo sapiens; identical to SEQ ID NO: 5159

SEQ ID NO: 5170 - DNA, 201 bp, Homo sapiens
gaaaataaggaagtattacctcagctggtggatgctgtcacctctgctcagacctcagactcattagaagccattttggactttttggatttcaaaagtgmcagcagcattatcctccaggagaggtttctctatgcctgtggatttgcttctcatcccaatgaagaactcctgagagccctcattagtaagttcaaaggt

SEQ ID NO: 5171 - DNA, 201 bp, Homo sapiens
  misc_feature (1)...(201): n = A,T,C or G, or insertion/deletion polymorphism (see Tables 1-2)
aaagagttctactcatatcaaaatgaggcagtggccatagaaaatatcaagagaggcctggctagcctatttcagacacagttaagctctggaaccaccantgaggtagatatctctggaaattgtaaagtgacctaccaggctcatcaagacaaagtgatcaaaattaaggccttggattcatgcaaaatagcgaggtct

SEQ ID NO: 5172 - DNA, 201 bp, Homo sapiens
ctctgcaaagacctacgctccttcatctaatccatggaaaggtcaaagagttctactcatatcaaaatgaggcagtggccatagaaaatatcaagagaggyctggctagcctatttcagacacagttaagctctggaaccaccaatgaggtagatatctctggaaattgtaaagtgacctaccaggctcatcaagacaaag

SEQ ID NO: 5173 - DNA, 201 bp, Homo sapiens
gttccctaatcaggaaaaaaaaaaaaaaaaaaagtaagacacaaacaaaccattttttttctctttttttggagttgggggcccagggagaagggacaagrcttttaaaagacttgttagccaacttcaagaattaatatttatgtctctgttattgttagttttaagccttaaggtagaaggcacatagaaataacatct

SEQ ID NO: 5174 - DNA, 201 bp, Homo sapiens
aaaatgtttttatttgtatgaattaaaagatccatgttgaacatttgcaaatatttattaataaacagatgtggtgataaacccaaaacaaatgacaggtscttattttccactaaacacagacacatgaaatgaaagtttagctagcccactatttgttgtaaattgaaaacgaagtgtgataaaataaatatgtagaaa

SEQ ID NO: 5175 - DNA, 201 bp, Homo sapiens
aggcagtggccatagaaaatatcaagagaggcctggctagcctatttcagacacagttaagctctggaaccaccaatgaggtagatatctctggaaattgyaaagtgacctaccaggctcatcaagacaaagtgatcaaaattaaggccttggattcatgcaaaatagcgaggtctggatttacgaccccaaatcaggtct

SEQ ID NO: 5176 - DNA, 201 bp, Homo sapiens
gcccaagattgatgtctggaaagcaggctgcagccataatcaaagcagttgattcaaagtacacggccattcccattgtggggcaggtcttccagagccastgtaaaggatgtccttctctctcggagctctggcggtccaccaggaaatacctgcagcctgacaacctttccaaggctgaggctgtcagaaacttcctgg

SEQ ID NO: 5177 - DNA, 201 bp, Homo sapiens
aagcagttgattcaaagtacacggccattcccattgtggggcaggtcttccagagccagtgtaaaggatgtccttctctctcggagctctggcggtccacmaggaaatacctgcagcctgacaacctttccaaggctgaggctgtcagaaacttcctggccttcattcagcacctcaggactgcgaagaaagaagagatcc

SEQ ID NO: 5178 - DNA, 201 bp, Homo sapiens
agagtccacttctcagtgactcctagctgggcactggatgcagttgaggattgctggtcaatatgattcttcttgctgtgctttttctctgcttcatttcstcatattcagcttctgttaaaggtcacacaactggtctctcattaaataatgaccggctgtacaagctcacgtactccactgaagttcttcttgatcggg

SEQ ID NO: 5179 - DNA, 201 bp, Homo sapiens
agcaggcttggagtttatctccacagtgcagttttctcagtacccattcttagtttgcatgcagatggacaaggatgaagctccattcaggcaatttgagwaaaagtacgaaaggctgtccacaggcagaggttatgtctctcagaaaagaaaagaaagcgtattagcaggatgtgaattcccgctccatcaagagaactc

SEQ ID NO: 5180 - DNA, 201 bp, Homo sapiens
tggccttactatggaggaatcctgatggtgatgatgaccagttgatccaaataacgatgaaggatgtaaatgttgaaaatgtgaatcagcagagaggagasaagagcatcttcaaaggaaaaagcccatctaaaataatgggaaaggaaaacttggaagctctgcaaagacctacgctccttcatctaatccatggaaagg

SEQ ID NO: 5181 - DNA, 201 bp, Homo sapiens
gctctccagagatatgatctccctttcataactgatgaggtgaagaagaccttaaacagaatataccaccaaaaccgtaaagttcatgaaaagactgtgcrcactgctgcagctgctatcattttaaataacaatccatcctacatggacgtcaagaacatcctgctgtctattggggagcttccccaagaaatgaataaa

SEQ ID NO: 5182 - DNA, 201 bp, Homo sapiens
acgtggatgtggccttactatggaggaatcctgatggtgatgatgaccagttgatccaaataacgatgaaggatgtaaatgttgaaaatgtgaatcagcasagaggagagaagagcatcttcaaaggaaaaagcccatctaaaataatgggaaaggaaaacttggaagctctgcaaagacctacgctccttcatctaatcc

SEQ ID NO: 5183 - DNA, 201 bp, Homo sapiens
tggggcaggtcttccagagccagtgtaaaggatgtccttctctctcggagctctggcggtccaccaggaaatacctgcagcctgacaacctttccaaggcygaggctgtcagaaacttcctggccttcattcagcacctcaggactgcgaagaaagaagagatccttcaaatactaaagatggaaaataaggaagtattac

SEQ ID NO: 5184 - DNA, 201 bp, Homo sapiens
ccatctaaaataatgggaaaggaaaacttggaagctctgcaaagacctacgctccttcatctaatccatggaaaggtcaaagagttctactcatatcaaartgaggcagtggccatagaaaatatcaagagaggcctggctagcctatttcagacacagttaagctctggaaccaccaatgaggtagatatctctggaaat

SEQ ID NO: 5185 - DNA, 201 bp, Homo sapiens
caaggatgaagctccattcaggcaatttgagaaaaagtacgaaaggctgtccacaggcagaggttatgtctctcagaaaagaaaagaaagcgtattagcakgatgtgaattcccgctccatcaagagaactcagagatgtgcaaagtggtgtttgcccctcagccggatagtacttccagcggatggttttgaaactgacc

SEQ ID NO: 5186 - DNA, 201 bp, Homo sapiens
gttcaaaggttctattggtagcagtgacatcagagaaactgttatgatcatcactgggacacttgtcagaaagttgtgtcagaatgaaggctgcaaactcwaagcagtagtggaagctaagaagttaatcctgggaggacttgaaaaagcagagaaaaaagaggacaccaggatgtatctgctggctttgaagaatgccct

SEQ ID NO: 5187 - DNA, 201 bp, Homo sapiens
gtcaagaacatcctgctgtctattggggagcttccccaagaaatgaataaatacatgctcgccattgttcaagacatcctacgttttgaaatgcctgcaakcaaaattgtccgtcgagttctgaaggaaatggtcgctcacaattatgaccgtttctccaggagtggatcttcttctgcctacactggctacatagaacgt

SEQ ID NO: 5188 - DNA, 201 bp, Homo sapiens
actaaaagccaatatagaggtccagggtggtctagctattgatatttcaggtgcaatggagtttagcttgtggtatcgtgagtctaaaacccgagtgaaawatagggtgactgtggtaataaccactgacatcacagtggactcctcttttgtgaaagctggcctggaaaccagtacagaaacagaagcaggcttggagtt

SEQ ID NO: 5189 - DNA, 201 bp, Homo sapiens
cagagaggagagaagagcatcttcaaaggaaaaagcccatctaaaataatgggaaaggaaaacttggaagctctgcaaagacctacgctccttcatctaayccatggaaaggtcaaagagttctactcatatcaaaatgaggcagtggccatagaaaatatcaagagaggcctggctagcctatttcagacacagttaagc

SEQ ID NO: 5190 - DNA, 201 bp, Homo sapiens
gttctactcatatcaaaatgaggcagtggccatagaaaatatcaagagaggcctggctagcctatttcagacacagttaagctctggaaccaccaatgagrtagatatctctggaaattgtaaagtgacctaccaggctcatcaagacaaagtgatcaaaattaaggccttggattcatgcaaaatagcgaggtctggatt

SEQ ID NO: 5191 - DNA, 201 bp, Homo sapiens
ctcgatcgggacgctggacagactccccaccaatgtgtgaagccatcaagtgcccagaactctttgccccagagcagggcagcctggattgttctgacacycgtggagaattcaatgttggctccacctgccatttctcttgtgacaacggctttaagctggaggggcccaataatgtggaatgcacaacttctggaagat

SEQ ID NO: 5192 - DNA, 201 bp, Homo sapiens
atgttggctccacctgccatttctcttgtgacaacggctttaagctggaggggcccaataatgtggaatgcacaacttctggaagatggtcagctactccrccaacctgcaaaggcatagcatcacttcctactccaggggtgcaatgtccagccctcaccactcctgggcagggaaccatgtactgtaggcatcatccgg

SEQ ID NO: 5193 - DNA, 201 bp, Homo sapiens
taagctggaggggcccaataatgtggaatgcacaacttctggaagatggtcagctactccaccaacctgcaaaggcatagcatcacttcctactccagggktgcaatgtccagccctcaccactcctgggcagggaaccatgtactgtaggcatcatccgggaacctttggttttaataccacttgttactttggctgcaa

SEQ ID NO: 5194 - DNA, 201 bp, Homo sapiens
agtgcccagaactctttgccccagagcagggcagcctggattgttctgacactcgtggagaattcaatgttggctccacctgccatttctcttgtgacaayggctttaagctggaggggcccaataatgtggaatgcacaacttctggaagatggtcagctactccaccaacctgcaaaggcatagcatcacttcctactc

SEQ ID NO: 5195 - DNA, 201 bp, Homo sapiens
acctgcaaaggcatagcatcacttcctactccaggggtgcaatgtccagccctcaccactcctgggcagggaaccatgtactgtaggcatcatccgggaamctttggttttaataccacttgttactttggctgcaacgctggattcacactcataggagacagcactctcagctgcagaccttcaggacaatggacagca

SEQ ID NO: 5196 - DNA, 201 bp, Homo sapiens
catcaagtgcccagaactctttgccccagagcagggcagcctggattgttctgacactcgtggagaattcaatgttggctccacctgccatttctcttgtracaacggctttaagctggaggggcccaataatgtggaatgcacaacttctggaagatggtcagctactccaccaacctgcaaaggcatagcatcacttcc

SEQ ID NO: 5197 - DNA, 201 bp, Homo sapiens
aaacttcagttatggatcaatctgctctttccattgtctagagggccagttacttaatggctctgcacaaacagcatgccaagagaatggccactggtcamctaccgtgccaacctgccaagatgatgggaaatgccccttgaatcctcacagccacctaggaacatatggagtttttacaaacgctgcatttgacccgag

SEQ ID NO: 5198 - DNA, 201 bp, Homo sapiens
gcctttaggtaccagtcagtctgcagcttcacctgcaatgaaggcttgctcctggtgggagcaagtgtgctacagtgcttggctactggaaactggaattytgttcctccagaatgccaagccattccctgcacacctttgctaagccctcagaatggaacaatgacctgtgttcaacctcttggaagttccagttataaa

SEQ ID NO: 5199 - DNA, 201 bp, Homo sapiens
tgaaggaaccatggactgtgttcatccgctcactgcttttgcctatggctccagctgtaaatttgagtgccagcccggctacagagtgaggggcttggacrtgctccgctgcattgactctggacactggtctgcacccttgccaacctgtgaggctatttcgtgtgagccgctggagagtcctgtccacggaagcatgga

SEQ ID NO: 5200 - DNA, 201 bp, Homo sapiens
gtgcaatgtccagccctcaccactcctgggcagggaaccatgtactgtaggcatcatccgggaacctttggttttaataccacttgttactttggctgcarcgctggattcacactcataggagacagcactctcagctgcagaccttcaggacaatggacagcagtaactccagcatgcagagctgtgaaatgctcagaa

SEQ ID NO: 5201 - DNA, 201 bp, Homo sapiens
ttagttggaccggaagtggtgcaatgcacagcctcgggggtatggacagccccagccccagtgtgtaaagctgtgcagtgtcagcacctggaagcccccartgaaggaaccatggactgtgttcatccgctcactgcttttgcctatggctccagctgtaaatttgagtgccagcccggctacagagtgaggggcttggac

SEQ ID NO: 5202 - DNA, 201 bp, Homo sapiens
aagctggaatgcttggcttctggaatctggacaaataagcctccacagtgtttagctgcccagtgcccacccctgaagattcctgaacgaggaaacatgayctgccttcattctgcaaaagcattccagcatcagtctagctgcagcttcagttgtgaagagggatttgcattagttggaccggaagtggtgcaatgcaca

SEQ ID NO: 5203 - DNA, 201 bp, Homo sapiens
caatgtgtgaagccatcaagtgcccagaactctttgccccagagcagggcagcctggattgttctgacactcgtggagaattcaatgttggctccacctgycatttctcttgtgacaacggctttaagctggaggggcccaataatgtggaatgcacaacttctggaagatggtcagctactccaccaacctgcaaaggca

SEQ ID NO: 5204 - DNA, 201 bp, Homo sapiens
cctgctcctgttaccctggattctatgggccagaatgtgaatacgtgagagagtgtggagaacttgagctccctcaacacgtgctcatgaactgcagccaycctctgggaaacttctcttttaactcgcagtgcagcttccactgcactgacgggtaccaagtaaatgggcccagcaagctggaatgcttggcttctggaa

SEQ ID NO: 5205 - DNA, 201 bp, Homo sapiens
gccgatatagttcggtgtgataacttgggacagtggacagcaccagccccagtctgtcaagctttgcagtgccaggatctcccagttccaaatgaggcccrggtgaactgctcccaccccttcggtgcctttaggtaccagtcagtctgcagcttcacctgcaatgaaggcttgctcctggtgggagcaagtgtgctacag

SEQ ID NO: 5206 - DNA, 201 bp, Homo sapiens
tccctgcacacctttgctaagccctcagaatggaacaatgacctgtgttcaacctcttggaagttccagttataaatccacatgtcaattcatctgtgacragggatattctttgtctggaccagaaagattggattgtactcgatcgggacgctggacagactccccaccaatgtgtgaagccatcaagtgcccagaact

SEQ ID NO: 5207 - DNA, 201 bp, Homo sapiens
tgccatttctcttgtgacaacggctttaagctggaggggcccaataatgtggaatgcacaacttctggaagatggtcagctactccaccaacctgcaaagkcatagcatcacttcctactccaggggtgcaatgtccagccctcaccactcctgggcagggaaccatgtactgtaggcatcatccgggaacctttggtttt

SEQ ID NO: 5208 - DNA, 201 bp, Homo sapiens
ttctgacactcgtggagaattcaatgttggctccacctgccatttctcttgtgacaacggctttaagctggaggggcccaataatgtggaatgcacaactkctggaagatggtcagctactccaccaacctgcaaaggcatagcatcacttcctactccaggggtgcaatgtccagccctcaccactcctgggcagggaac

SEQ ID NO: 5209 - DNA, 201 bp, Homo sapiens
caacctgcaaaggcatagcatcacttcctactccaggggtgcaatgtccagccctcaccactcctgggcagggaaccatgtactgtaggcatcatccgggracctttggttttaataccacttgttactttggctgcaacgctggattcacactcataggagacagcactctcagctgcagaccttcaggacaatggacag

SEQ ID NO: 5210 - DNA, 201 bp, Homo sapiens
cctgaacgaggaaacatgacctgccttcattctgcaaaagcattccagcatcagtctagctgcagcttcagttgtgaagagggatttgcattagttggacyggaagtggtgcaatgcacagcctcgggggtatggacagccccagccccagtgtgtaaagctgtgcagtgtcagcacctggaagcccccagtgaaggaacc

SEQ ID NO: 5211 - DNA, 201 bp, Homo sapiens
cgagaccatcgggaactacacctgctcctgttaccctggattctatgggccagaatgtgaatacgtgagagagtgtggagaacttgagctccctcaacacrtgctcatgaactgcagccaccctctgggaaacttctcttttaactcgcagtgcagcttccactgcactgacgggtaccaagtaaatgggcccagcaagct

SEQ ID NO: 5212 - DNA, 138 bp, Homo sapiens
gatggcaccagaggctgcagaaggccaagaatcaagctagaaggccacatgtcaccgtggaccttcctgccaccagtcactgtccctcaaatgacccaaasaccaatattcaaatgcgtaattaaaagaattttcccc

SEQ ID NO: 5213 - DNA, 201 bp, Homo sapiens
ccaaaaaggctctcaccaacgaggctgagaactgggctgataatgaacctaacaacaaaaggaacaacgaggactgcgtggagatatacatcaagagtccrtcagcccctggcaagtggaatgatgagcactgcttgaagaaaaagcacgcattgtgttacacagcctcctgccaggacatgtcctgcagcaaacaaggag

SEQ ID NO: 5214 - DNA, 201 bp, Homo sapiens; identical to SEQ ID NO: 5191

SEQ ID NO: 5215 - DNA, 201 bp, Homo sapiens; identical to SEQ ID NO: 5192

SEQ ID NO: 5216 - DNA, 201 bp, Homo sapiens; identical to SEQ ID NO: 5193

SEQ ID NO: 5217 - DNA, 201 bp, Homo sapiens; identical to SEQ ID NO: 5194

SEQ ID NO: 5218 - DNA, 201 bp, Homo sapiens; identical to SEQ ID NO: 5195

SEQ ID NO: 5219 - DNA, 201 bp, Homo sapiens; identical to SEQ ID NO: 5196

SEQ ID NO: 5220 - DNA, 201 bp, Homo sapiens
aaacttcagttatggatcaatctgctctttccattgtctagagggccagttacttaatggctctgcacaaacagcatgccaagagaatggccactggtcamctaccgtgccaacctgccaagcaggaccattgactatccaggaagccctgacttactttggtggagcggtggcttctacgataggtctgataatgggtgg

SEQ ID NO: 5221 - DNA, 201 bp, Homo sapiens; identical to SEQ ID NO: 5198

SEQ ID NO: 5222 - DNA, 201 bp, Homo sapiens; identical to SEQ ID NO: 5200

SEQ ID NO: 5223 - DNA, 201 bp, Homo sapiens; identical to SEQ ID NO: 5202

SEQ ID NO: 5224 - DNA, 201 bp, Homo sapiens; identical to SEQ ID NO: 5203

SEQ ID NO: 5225 - DNA, 201 bp, Homo sapiens; identical to SEQ ID NO: 5204

SEQ ID NO: 5226 - DNA, 201 bp, Homo sapiens; identical to SEQ ID NO: 5205

SEQ ID NO: 5227 - DNA, 201 bp, Homo sapiens; identical to SEQ ID NO: 5206

SEQ ID NO: 5228 - DNA, 201 bp, Homo sapiens; identical to SEQ ID NO: 5207

SEQ ID NO: 5229 - DNA, 201 bp, Homo sapiens; identical to SEQ ID NO: 5208

SEQ ID NO: 5230 - DNA, 201 bp, Homo sapiens; identical to SEQ ID NO: 5209

SEQ ID NO: 5231 - DNA, 201 bp, Homo sapiens
cctgaacgaggaaacatgacctgccttcattctgcaaaagcattccagcatcagtctagctgcagcttcagttgtgaagagggatttgcattagttggacyggaagtggtgcaatgcacagcctcgggggtatggacagccccagccccagtgtgtaaagctatttcgtgtgagccgctggagagtcctgtccacggaagc

SEQ ID NO: 5232 - DNA, 201 bp, Homo sapiens; identical to SEQ ID NO: 5211

SEQ ID NO: 5233 - DNA, 138 bp, Homo sapiens; identical to SEQ ID NO: 5212

SEQ ID NO: 5234 - DNA, 201 bp, Homo sapiens; identical to SEQ ID NO: 5213

SEQ ID NO: 5235 - DNA, 201 bp, Homo sapiens
aagagaatggccactggtcaactaccgtgccaacctgccaagcaggaccattgactatccaggaagccctgacttactttggtggagcggtggcttctacrataggtctgataatgggtgggacgctcctggctttgctaagaaagcgtttcagacaaaaagatgatgggaaatgccccttgaatcctcacagccacctag

SEQ ID NO: 5236 - DNA, 201 bp, Homo sapiens; identical to SEQ ID NO: 5191

SEQ ID NO: 5237 - DNA, 201 bp, Homo sapiens; identical to SEQ ID NO: 5192

SEQ ID NO: 5238 - DNA, 201 bp, Homo sapiens; identical to SEQ ID NO: 5193

SEQ ID NO: 5239 - DNA, 201 bp, Homo sapiens; identical to SEQ ID NO: 5194

SEQ ID NO: 5240 - DNA, 201 bp, Homo sapiens; identical to SEQ ID NO: 5195

SEQ ID NO: 5241 - DNA, 201 bp, Homo sapiens; identical to SEQ ID NO: 5196

SEQ ID NO: 5242 - DNA, 201 bp, Homo sapiens; identical to SEQ ID NO: 5220

SEQ ID NO: 5243 - DNA, 201 bp, Homo sapiens; identical to SEQ ID NO: 5198

SEQ ID NO: 5244 - DNA, 201 bp, Homo sapiens; identical to SEQ ID NO: 5199

SEQ ID NO: 5245 - DNA, 201 bp, Homo sapiens; identical to SEQ ID NO: 5200

SEQ ID NO: 5246 - DNA, 201 bp, Homo sapiens; identical to SEQ ID NO: 5201

SEQ ID NO: 5247 - DNA, 201 bp, Homo sapiens; identical to SEQ ID NO: 5202

SEQ ID NO: 5248 - DNA, 201 bp, Homo sapiens; identical to SEQ ID NO: 5203

SEQ ID NO: 5249 - DNA, 201 bp, Homo sapiens; identical to SEQ ID NO: 5204

SEQ ID NO: 5250 - DNA, 201 bp, Homo sapiens; identical to SEQ ID NO: 5205

SEQ ID NO: 5251 - DNA, 201 bp, Homo sapiens; identical to SEQ ID NO: 5206

SEQ ID NO: 5252 - DNA, 201 bp, Homo sapiens; identical to SEQ ID NO: 5207

SEQ ID NO: 5253 - DNA, 201 bp, Homo sapiens; identical to SEQ ID NO: 5208

SEQ ID NO: 5254 - DNA, 201 bp, Homo sapiens; identical to SEQ ID NO: 5209

SEQ ID NO: 5255 - DNA, 201 bp, Homo sapiens; identical to SEQ ID NO: 5210

SEQ ID NO: 5256 - DNA, 201 bp, Homo sapiens; identical to SEQ ID NO: 5211

SEQ ID NO: 5257 - DNA, 138 bp, Homo sapiens; identical to SEQ ID NO: 5212

SEQ ID NO: 5258 - DNA, 201 bp, Homo sapiens; identical to SEQ ID NO: 5213

SEQ ID NO: 5259 - DNA, 201 bp, Homo sapiens; identical to SEQ ID NO: 5235

SEQ ID NO: 5260 - DNA, 201 bp, Homo sapiens; identical to SEQ ID NO: 5191

SEQ ID NO: 5261 - DNA, 201 bp, Homo sapiens; identical to SEQ ID NO: 5192

SEQ ID NO: 5262 - DNA, 201 bp, Homo sapiens; identical to SEQ ID NO: 5193

SEQ ID NO: 5263 - DNA, 201 bp, Homo sapiens; identical to SEQ ID NO: 5194

SEQ ID NO: 5264 - DNA, 201 bp, Homo sapiens; identical to SEQ ID NO: 5195

SEQ ID NO: 5265 - DNA, 201 bp, Homo sapiens; identical to SEQ ID NO: 5196

SEQ ID NO: 5266 - DNA, 201 bp, Homo sapiens; identical to SEQ ID NO: 5220

SEQ ID NO: 5267 - DNA, 201 bp, Homo sapiens; identical to SEQ ID NO: 5198

SEQ ID NO: 5268 - DNA, 201 bp, Homo sapiens; identical to SEQ ID NO: 5199

SEQ ID NO: 5269 - DNA, 201 bp, Homo sapiens; identical to SEQ ID NO: 5200

SEQ ID NO: 5270 - DNA, 201 bp, Homo sapiens; identical to SEQ ID NO: 5201

SEQ ID NO: 5271 - DNA, 201 bp, Homo sapiens; identical to SEQ ID NO: 5202

SEQ ID NO: 5272 - DNA, 201 bp, Homo sapiens; identical to SEQ ID NO: 5203

SEQ ID NO: 5273 - DNA, 201 bp, Homo sapiens; identical to SEQ ID NO: 5204

SEQ ID NO: 5274 - DNA, 201 bp, Homo sapiens; identical to SEQ ID NO: 5205

SEQ ID NO: 5275 - DNA, 201 bp, Homo sapiens; identical to SEQ ID NO: 5206

SEQ ID NO: 5276 - DNA, 201 bp, Homo sapiens; identical to SEQ ID NO: 5207

SEQ ID NO: 5277 - DNA, 201 bp, Homo sapiens; identical to SEQ ID NO: 5208

SEQ ID NO: 5278 - DNA, 201 bp, Homo sapiens; identical to SEQ ID NO: 5209

SEQ ID NO: 5279 - DNA, 201 bp, Homo sapiens; identical to SEQ ID NO: 5210

SEQ ID NO: 5280 - DNA, 201 bp, Homo sapiens; identical to SEQ ID NO: 5211

SEQ ID NO: 5281 - DNA, 138 bp, Homo sapiens; identical to SEQ ID NO: 5212

SEQ ID NO: 5282 - DNA, 201 bp, Homo sapiens; identical to SEQ ID NO: 5213

SEQ ID NO: 5283 - DNA, 201 bp, Homo sapiens; identical to SEQ ID NO: 5235

SEQ ID NO: 5284 - DNA, 201 bp, Homo sapiens
actctcaatgatacttttctatcaaaggaatttaatccactggttatagtgggcctcagtaaagatggtacagattacattgagatcattccaaaggaagmggtccagagcagtgaagatgactatgctgaaattgattatgtgccctatgatgacccctacaaaactgatgttaggacaaacatcaactcctccagagat

SEQ ID NO: 5285 - DNA, 201 bp, Homo sapiens
ggcccagagggaaagtggatcatatcttctctcaccccaaaacatttgcaagctgggatgcaggcttacattgacattaaaaactgcccaaagaaaaccasgaatcttaagaaaataactcgtgagcagaggcggcacatgaagaggtgggaatacttcattgctgcagaggaagtcatttgggactatgcacctgtaata

SEQ ID NO: 5286 - DNA, 201 bp, Homo sapiens
tcagagacacactcaaaatcgtgttcaaaaatatggccagccgcccctatagcatttaccctcatggagtgaccttctcgccttatgaagatgaagtcaaytcttctttcacctcaggcaggaacaacaccatgatcagagcagttcaaccaggggaaacctatacttataagtggaacatcttagagtttgatgaaccca

SEQ ID NO: 5287 - DNA, 201 bp, Homo sapiens
gacctgagcccacaaactcaagtttgaatctttctgtaacttcctttaagaaaattgtctacagagagtatgaaccatattttaagaaagaaaaaccacartctaccatttcaggacttcttgggcctactttatatgctgaagtcggagacatcataaaagttcactttaaaaataaggcagataagcccttgagcatcc

SEQ ID NO: 5288 - DNA, 201 bp, Homo sapiens
tggctgcagcattaggaatcaggtcattccgaaactcatcattgaatcaggaagaagaagagttcaatcttactgccctagctctggagaatggcactgarttcgtttcttcaaacacagatataattgttggttcaaattattcttccccaagtaatattagtaagttcactgtcaataaccttgcagaacctcagaaag

SEQ ID NO: 5289 - DNA, 201 bp, Homo sapiens
taagaaagaaaaaccacaatctaccatttcaggacttcttgggcctactttatatgctgaagtcggagacatcataaaagttcactttaaaaataaggcasataagcccttgagcatccatcctcaaggaattaggtacagtaaattatcagaaggtgcttcttaccttgaccacacattccctgcggagaagatggacga

SEQ ID NO: 5290 - DNA, 201 bp, Homo sapiens
acggaaaatgcatgatcgtttagaacctgaagatgaagagagtgatgctgactatgattaccagaacagactggctgcagcattaggaatcaggtcattcygaaactcatcattgaatcaggaagaagaagagttcaatcttactgccctagctctggagaatggcactgaattcgtttcttcaaacacagatataattgt

SEQ ID NO: 5291 - DNA, 201 bp, Homo sapiens
gttttatgaatcaaacatcatgagcactatcaatggctatgtgcctgagagcataactactcttggattctgctttgatgacactgtccagtggcacttcygtagtgtggggacccagaatgaaattttgaccatccacttcactgggcactcattcatctatggaaagaggcatgaggacaccttgaccctcttccccat

SEQ ID NO: 5292 - DNA, 201 bp, Homo sapiens
aaagtggatcatatcttctctcaccccaaaacatttgcaagctgggatgcaggcttacattgacattaaaaactgcccaaagaaaaccaggaatcttaagwaaataactcgtgagcagaggcggcacatgaagaggtgggaatacttcattgctgcagaggaagtcatttgggactatgcacctgtaataccagcgaatat

SEQ ID NO: 5293 - DNA, 201 bp, Homo sapiens
ctactcagctgtgaacccagaaaaagatattcactcaggcttgataggtcccctcctaatctgccaaaaaggaatactacataaggacagcaacatgcctrtggacatgagagaatttgtcttactatttatgacctttgatgaaaagaagagctggtactatgaaaagaagtcccgaagttcttggagactcacatcctc

SEQ ID NO: 5294 - DNA, 201 bp, Homo sapiens
acccctgggtatggaaaatggaaagatagaaaacaagcaaatcacagcttcttcgtttaagaaatcttggtggggagattactgggaacccttccgtgccygtctgaatgcccagggacgtgtgaatgcctggcaagccaaggcaaacaacaataagcagtggctagaaattgatctactcaagatcaagaagataacggc

SEQ ID NO: 5295 - DNA, 201 bp, Homo sapiens
gctgtgtttgatgaaagcaagagctggagccagtcatcatccctaatgtacacagtcaatggatatgtgaatgggacaatgccagatataacagtttgtgyccatgaccacatcagctggcatctgctgggaatgagctcggggccagaattattctccattcatttcaacggccaggtcctggagcagaaccatcataag

SEQ ID NO: 5296 - DNA, 201 bp, Homo sapiens
cttaacaagaccatactacagtgacgtggacatcatgagagacatcgcctctgggctaataggactacttctaatctgtaagagcagatccctggacaggygaggaatacagagggcagcagacatcgaacagcaggctgtgtttgctgtgtttgatgagaacaaaagctggtaccttgaggacaacatcaacaagttttg

SEQ ID NO: 5297 - DNA, 201 bp, Homo sapiens
gataatgctgttcagccaaatagcagttatacctacgtatggcatgccactgagcgatcagggccagaaagtcctggctctgcctgtcgggcttgggcctrctactcagctgtgaacccagaaaaagatattcactcaggcttgataggtcccctcctaatctgccaaaaaggaatactacataaggacagcaacatgcct

SEQ ID NO: 5298 - DNA, 201 bp, Homo sapiens
ctctctccagaactcagccatatgactctctctccagaactcagtcagacaaacctttccccagccctcggtcagatgcccatttctccagacctcagccrtacaaccctttctctagacttcagccagacaaacctctctccagaactcagtcaaacaaacctttccccagccctcggtcagatgcccctttctccagac

SEQ ID NO: 5299 - DNA, 201 bp, Homo sapiens
agtcccgaagttcttggagactcacatcctcagaaatgaaaaaatcccatgagtttcacgccattaatgggatgatctacagcttgcctggcctgaaaatrtatgagcaagagtgggtgaggttacacctgctgaacataggcggctcccaagacattcacgtggttcactttcacggccagaccttgctggaaaatggca

SEQ ID NO: 5300 - DNA, 201 bp, Homo sapiens
cccctgggtatggaaaatggaaagatagaaaacaagcaaatcacagcttcttcgtttaagaaatcttggtggggagattactgggaacccttccgtgcccrtctgaatgcccagggacgtgtgaatgcctggcaagccaaggcaaacaacaataagcagtggctagaaattgatctactcaagatcaagaagataacggca

SEQ ID NO: 5301 - DNA, 201 bp, Homo sapiens
ataatttctcaaaccaaattggaaaacattataagaaagttatgtacacacagtacgaagatgagtccttcaccaaacatacagtgaatcccaatatgaargaagatgggattttgggtcctattatcagagcccaggtcagagacacactcaaaatcgtgttcaaaaatatggccagccgcccctatagcatttaccctc

SEQ ID NO: 5302 - DNA, 201 bp, Homo sapiens
ttggataatttctcaaaccaaattggaaaacattataagaaagttatgtacacacagtacgaagatgagtccttcaccaaacatacagtgaatcccaataygaaagaagatgggattttgggtcctattatcagagcccaggtcagagacacactcaaaatcgtgttcaaaaatatggccagccgcccctatagcatttac

SEQ ID NO: 5303 - DNA, 201 bp, Homo sapiens
gtttagaacctgaagatgaagagagtgatgctgactatgattaccagaacagactggctgcagcattaggaatcaggtcattccgaaactcatcattgaaycaggaagaagaagagttcaatcttactgccctagctctggagaatggcactgaattcgtttcttcaaacacagatataattgttggttcaaattattctt

SEQ ID NO: 5304 - DNA, 201 bp, Homo sapiens
gtcctccaggtctttatcagacagtgcccccagaggaacactatcaaacattccccattcaagaccctgatcaaatgcactctacttcagaccccagtcasagatcctcttctccagagctcagtgaaatgcttgagtatgaccgaagtcacaagtccttccccacagatataagtcaaatgtccccttcctcagaacatg

SEQ ID NO: 5305 - DNA, 201 bp, Homo sapiens
tcatggctacacggaaaatgcatgatcgtttagaacctgaagatgaagagagtgatgctgactatgattaccagaacagactggctgcagcattaggaatyaggtcattccgaaactcatcattgaatcaggaagaagaagagttcaatcttactgccctagctctggagaatggcactgaattcgtttcttcaaacacag

SEQ ID NO: 5306 - DNA, 201 bp, Homo sapiens
gaagtgaagcctacaacacattttcagaaagaagacttaagcattcgttggtgcttcataaatccaatgaaacatctcttcccacagacctcaatcagacrttgccctctatggattttggctggatagcctcacttcctgaccataatcagaattcctcaaatgacactggtcaggcaagctgtcctccaggtctttatc

SEQ ID NO: 5307 - DNA, 201 bp, Homo sapiens
aaattattcttccccaagtaatattagtaagttcactgtcaataaccttgcagaacctcagaaagccccttctcaccaacaagccaccacagctggttccycactgagacacctcattggcaagaactcagttctcaattcttccacagcagagcattccagcccatattctgaagaccctatagaggatcctctacagcc

SEQ ID NO: 5308 - DNA, 201 bp, Homo sapiens
agtggcacttctgtagtgtggggacccagaatgaaattttgaccatccacttcactgggcactcattcatctatggaaagaggcatgaggacaccttgacmctcttccccatgcgtggagaatctgtgacggtcacaatggataatgttggaacttggatgttaacttccatgaattctagtccaagaagcaaaaagctga

SEQ ID NO: 5309 - DNA, 201 bp, Homo sapiens
aatggagtatcagtgaggacagtggacccacccatgatgaccctccatgcctcacacacatctattactcccatgaaaatctgatcgaggatttcaactckgggctgattgggcccctgcttatctgtaaaaaagggaccctaactgagggtgggacacagaagacgtttgacaagcaaatcgtgctactatttgctgtgt

SEQ ID NO: 5310 - DNA, 201 bp, Homo sapiens
cagcagacatcgaacagcaggctgtgtttgctgtgtttgatgagaacaaaagctggtaccttgaggacaacatcaacaagttttgtgaaaatcctgatgargtgaaacgtgatgaccccaagttttatgaatcaaacatcatgagcactatcaatggctatgtgcctgagagcataactactcttggattctgctttgatg

SEQ ID NO: 5311 - DNA, 201 bp, Homo sapiens
ttaaaaataaggcagataagcccttgagcatccatcctcaaggaattaggtacagtaaattatcagaaggtgcttcttaccttgaccacacattccctgcrgagaagatggacgacgctgtggctccaggccgagaatacacctatgaatggagtatcagtgaggacagtggacccacccatgatgaccctccatgcctca

SEQ ID NO: 5312 - DNA, 201 bp, Homo sapiens
gtgaggacagtggacccacccatgatgaccctccatgcctcacacacatctattactcccatgaaaatctgatcgaggatttcaactcggggctgattggscccctgcttatctgtaaaaaagggaccctaactgagggtgggacacagaagacgtttgacaagcaaatcgtgctactatttgctgtgtttgatgaaagca

SEQ ID NO: 5313 - DNA, 201 bp, Homo sapiens
caaagtaactcatctaagattttggttgggagatggcatttggcttctgagaaaggtagctatgaaataatccaagatactgatgaagacacagctgttarcaattggctgatcagcccccagaatgcctcacgtgcttggggagaaagcacccctcttgccaacaagcctggaaagcagagtggccacccaaagtttcct

SEQ ID NO: 5314 - DNA, 201 bp, Homo sapiens
aagaactttttcaaccccccaatcatttccaggtttatccgtgtcattcctaaaacatggaatcaaagtattgcacttcgcctggaactctttggctgtgrtatttactagaattgaacattcaaaaacccctggaagagactctttaagacctcaaaccatttagaatgggcaatgtattttacgctgtgttaaatgtta

SEQ ID NO: 5315 - DNA, 201 bp, Homo sapiens
cggcaagcgctgcccaggtcctggggtggtggcagccagcgggagcaggaaaggaagcatgttcccaggctgcccacgcctctgggtcctggtggtcttgrgcaccagctgggtaggctgggggagccaagggacagaagcggcacagctaaggcagttctacgtggctgctcagggcatcagttggagctaccgacctga

SEQ ID NO: 5316 - DNA, 201 bp, Homo sapiens
tgggtatggaaaatggaaagatagaaaacaagcaaatcacagcttcttcgtttaagaaatcttggtggggagattactgggaacccttccgtgcccgtctraatgcccagggacgtgtgaatgcctggcaagccaaggcaaacaacaataagcagtggctagaaattgatctactcaagatcaagaagataacggcaatta

SEQ ID NO: 5317 - DNA, 201 bp, Homo sapiens
tcagccatacaaccctttctccagacctcagccatacaaccctttctttagacctcagccagacaaacctctctccagaactcagtcagacaaacctttcyccagccctcggtcagatgcccctttctccagacctcagccatacaaccctttctctagacttcagccagacaaacctctctccagaactcagccatatga

SEQ ID NO: 5318 - DNA, 201 bp, Homo sapiens
gggcccagagggaaagtggatcatatcttctctcaccccaaaacatttgcaagctgggatgcaggcttacattgacattaaaaactgcccaaagaaaaccrggaatcttaagaaaataactcgtgagcagaggcggcacatgaagaggtgggaatacttcattgctgcagaggaagtcatttgggactatgcacctgtaat

SEQ ID NO: 5319 - DNA, 201 bp, Homo sapiens
aaacacagatataattgttggttcaaattattcttccccaagtaatattagtaagttcactgtcaataaccttgcagaacctcagaaagccccttctcacyaacaagccaccacagctggttccccactgagacacctcattggcaagaactcagttctcaattcttccacagcagagcattccagcccatattctgaaga

SEQ ID NO: 5320 - DNA, 201 bp, Homo sapiens
tcaaacattccccattcaagaccctgatcaaatgcactctacttcagaccccagtcacagatcctcttctccagagctcagtgaaatgcttgagtatgacygaagtcacaagtccttccccacagatataagtcaaatgtccccttcctcagaacatgaagtctggcagacagtcatctctccagacctcagccaggtgac

SEQ ID NO: 5321 - DNA, 201 bp, Homo sapiens
gagacacctaagccaagacactggttctccttccggaatgaggccctgggaggaccttcctagccaagacactggttctccttccagaatgaggccctggraggaccctcctagtgatctgttactcttaaaacaaagtaactcatctaagattttggttgggagatggcatttggcttctgagaaaggtagctatgaaat

SEQ ID NO: 5322 - DNA, 201 bp, Homo sapiens
tctgaagaccctatagaggatcctctacagccagatgtcacagggatacgtctactttcacttggtgctggagaattcaaaagtcaagaacatgctaagcrtaagggacccaaggtagaaagagatcaagcagcaaagcacaggttctcctggatgaaattactagcacataaagttgggagacacctaagccaagacact

SEQ ID NO: 5323 - DNA, 201 bp, Homo sapiens
ttaacaagaccatactacagtgacgtggacatcatgagagacatcgcctctgggctaataggactacttctaatctgtaagagcagatccctggacaggcraggaatacagagggcagcagacatcgaacagcaggctgtgtttgctgtgtttgatgagaacaaaagctggtaccttgaggacaacatcaacaagttttgt

SEQ ID NO: 5324 - DNA, 201 bp, Homo sapiens
agacctcagccagacaaacctctctccagaactcagtcagacaaacctttctccagccctcggtcagatgcccctttctccagacctcagccatacaaccmtttctctagacttcagccagacaaacctctctccagaactcagccatatgactctctctccagaactcagtcagacaaacctttccccagccctcggtca

SEQ ID NO: 5325 - DNA, 201 bp, Homo sapiens
atcagggccagaaagtcctggctctgcctgtcgggcttgggcctactactcagctgtgaacccagaaaaagatattcactcaggcttgataggtcccctcstaatctgccaaaaaggaatactacataaggacagcaacatgcctatggacatgagagaatttgtcttactatttatgacctttgatgaaaagaagagctg

SEQ ID NO: 5326 - DNA, 201 bp, Homo sapiens
gcagagcattccagcccatattctgaagaccctatagaggatcctctacagccagatgtcacagggatacgtctactttcacttggtgctggagaattcaraagtcaagaacatgctaagcataagggacccaaggtagaaagagatcaagcagcaaagcacaggttctcctggatgaaattactagcacataaagttggg

SEQ ID NO: 5327 - DNA, 201 bp, Homo sapiens
gaagtcacaagtccttccccacagatataagtcaaatgtccccttcctcagaacatgaagtctggcagacagtcatctctccagacctcagccaggtgacyctctctccagaactcagccagacaaacctctctccagacctcagccacacgactctctctccagaactcattcagagaaacctttccccagccctcggtc

SEQ ID NO: 5328 - DNA, 201 bp, Homo sapiens
acctatacttataagtggaacatcttagagtttgatgaacccacagaaaatgatgcccagtgcttaacaagaccatactacagtgacgtggacatcatgaragacatcgcctctgggctaataggactacttctaatctgtaagagcagatccctggacaggcgaggaatacagagggcagcagacatcgaacagcaggct

SEQ ID NO: 5329 - DNA, 201 bp, Homo sapiens
agtaagttcactgtcaataaccttgcagaacctcagaaagccccttctcaccaacaagccaccacagctggttccccactgagacacctcattggcaagamctcagttctcaattcttccacagcagagcattccagcccatattctgaagaccctatagaggatcctctacagccagatgtcacagggatacgtctactt

SEQ ID NO: 5330 - DNA, 201 bp, Homo sapiens
gtggatgatgttatccaagttcgttttaaaaatttagcatccagaccgtattctctacatgcccatggactttcctatgaaaaatcatcagagggaaagasttatgaagatgactctcctgaatggtttaaggaagataatgctgttcagccaaatagcagttatacctacgtatggcatgccactgagcgatcagggcca

SEQ ID NO: 5331 - DNA, 201 bp, Homo sapiens
taggaatcaggtcattccgaaactcatcattgaatcaggaagaagaagagttcaatcttactgccctagctctggagaatggcactgaattcgtttcttcraacacagatataattgttggttcaaattattcttccccaagtaatattagtaagttcactgtcaataaccttgcagaacctcagaaagccccttctcacc

SEQ ID NO: 5332 - DNA, 201 bp, Homo sapiens
tagacttcagccagacaaacctctctccagaactcagtcaaacaaacctttccccagccctcggtcagatgcccctttctccagaccccagccatacaacyctttctctagacctcagccagacaaacctctctccagaactcagtcagacaaacctttccccagacctcagtgagatgcccctctttgcagatctcagtc

SEQ ID NO: 5333 - DNA, 201 bp, Homo sapiens
tcggaattcttggtcctattatcagagctgaagtggatgatgttatccaagttcgttttaaaaatttagcatccagaccgtattctctacatgcccatggrctttcctatgaaaaatcatcagagggaaagacttatgaagatgactctcctgaatggtttaaggaagataatgctgttcagccaaatagcagttatacct

SEQ ID NO: 5334 - DNA, 201 bp, Homo sapiens
atctgtaagagcagatccctggacaggcgaggaatacagagggcagcagacatcgaacagcaggctgtgtttgctgtgtttgatgagaacaaaagctggtmccttgaggacaacatcaacaagttttgtgaaaatcctgatgaggtgaaacgtgatgaccccaagttttatgaatcaaacatcatgagcactatcaatggc

SEQ ID NO: 5335 - DNA, 201 bp, Homo sapiens
actctgaacacgctggttatctaaatgagaagcagagaaataaagtcaagaaaatttacctggatgaaaagaggcttttggctggggaccatcccattgaycttctcttaagggactttaagaaaaactaccacatgtatgtgtatcctgtgcactggcagtttagtgaacttgaccaacaccctatggatagagtcttga

SEQ ID NO: 5336 - DNA, 201 bp, Homo sapiens
ggctttttttcctatgtctcttgggaactgcagctgcaatcccgacaaatgcaagattattatctgatcattccaaaccaactgctgaaacggtagcaccygacaacactgcaatccccagtttaagggctgaagctgaagaaaatgaaaaagaaacagcagtatccacagaagacgattcccaccataaggctgaaaaat

SEQ ID NO: 5337 - DNA, 201 bp, Homo sapiens
atcccgacaaatgcaagattattatctgatcattccaaaccaactgctgaaacggtagcacctgacaacactgcaatccccagtttaagggctgaagctgragaaaatgaaaaagaaacagcagtatccacagaagacgattcccaccataaggctgaaaaatcatcagtactaaagtcaaaagaggaaagccatgaacag

SEQ ID NO: 5338 - DNA, 201 bp, Homo sapiens
gcaaagagaaaaagtacatgaaaatgaaaatataggtaccactgagcctggagagcaccaagaggccaagaaagcagagaactcatcaaatgaggaggaarcgtcaagtgaaggcaacatgagggtgcatgctgtggattcttgcatgagcttccagtgtaaaagaggccacatctgtaaggcagaccaacagggaaaacc

SEQ ID NO: 5339 - DNA, 201 bp, Homo sapiens
agaaagacagaattgcccagggagcatgctaacagcaagcaggaggaagacaatacccaatctgatgatattttggaagagtctgatcaaccaactcaagwaagcaagatgcaggaggatgaatttgatcagggtaaccaagaacaagaagataactccaatgcagaaatggaagaggaaaatgcatcgaacgtcaataag

SEQ ID NO: 5340 - DNA, 201 bp, Homo sapiens
ccccaacaaggataagcacatcaccctgaaggagtggggccactgctttggaattaaagaagaggacatagatgaaaatctcttgttttgaacgaagattwtaaagaactcaactttccagcatcctcctctgttctaaccacttcagaaatatatgcagctgtgatacttgtagatttatatttagcaaaatgttagcat

SEQ ID NO: 5341 - DNA, 201 bp, Homo sapiens
gcaatcccgacaaatgcaagattattatctgatcattccaaaccaactgctgaaacggtagcacctgacaacactgcaatccccagtttaagggctgaagmtgaagaaaatgaaaaagaaacagcagtatccacagaagacgattcccaccataaggctgaaaaatcatcagtactaaagtcaaaagaggaaagccatgaa

SEQ ID NO: 5342 - DNA, 201 bp, Homo sapiens
agtactaaagtcaaaagaggaaagccatgaacagtcagcagaacagggcaagagttctagccaagagctgggattgaaggatcaagaggacagtgatggtsacttaagtgtgaatttggagtatgcaccaactgaaggtacattggacataaaagaagatatgagtgagcctcaggagaaaaaactctcagagaacactga

SEQ ID NO: 5343 - DNA, 201 bp, Homo sapiens; identical to SEQ ID NO: 5335

SEQ ID NO: 5344 - DNA, 201 bp, Homo sapiens; identical to SEQ ID NO: 5336

SEQ ID NO: 5345 - DNA, 201 bp, Homo sapiens; identical to SEQ ID NO: 5337

SEQ ID NO: 5346 - DNA, 201 bp, Homo sapiens; identical to SEQ ID NO: 5338

SEQ ID NO: 5347 - DNA, 201 bp, Homo sapiens; identical to SEQ ID NO: 5339

SEQ ID NO: 5348 - DNA, 201 bp, Homo sapiens; identical to SEQ ID NO: 5340

SEQ ID NO: 5349 - DNA, 201 bp, Homo sapiens; identical to SEQ ID NO: 5341

SEQ ID NO: 5350 - DNA, 201 bp, Homo sapiens; identical to SEQ ID NO: 5342

SEQ ID NO: 5351 - DNA, 201 bp, Homo sapiens
ctgaaatactctctggtgccaacctccaaattctcgtctgtcacttcagacccccactagttgacagagcagcagaatttcaactccagtagacttgaatrtgcctctgggcaaagaagcagagctaacgaggaaagggatttaaagagtttttcttgggtgtttgtcaaacttttattccctgtctgtgtgcagagggga

SEQ ID NO: 5352 - DNA, 201 bp, Homo sapiens
ctgcaacaaaaacgatgacagtctgaaatactctctggtgccaacctccaaattctcgtctgtcacttcagacccccactagttgacagagcagcagaatwtcaactccagtagacttgaatatgcctctgggcaaagaagcagagctaacgaggaaagggatttaaagagtttttcttgggtgtttgtcaaacttttatt

SEQ ID NO: 5353 - DNA, 201 bp, Homo sapiens
ggagtagaagccaaaaggatctttaaaaaggattgagcattattcttggcgcacagtccaaaatacaaattggacagaagatctatattgtaccagaactrtttatttcaccccatcaagtataaggttactgattgattggtccttttataaacattggtatatttccattcatgccaaagcaaaagaagtaaaagctaa

SEQ ID NO: 5354 - DNA, 201 bp, Homo sapiens
ctgtccgagaaattataggtgatgaactagtccagacttatgtgtatgaaggagtagaagccaaaaggatctttaaaaaggattgagcattattcttggcrcacagtccaaaatacaaattggacagaagatctatattgtaccagaactatttatttcaccccatcaagtataaggttactgattgattggtccttttat

SEQ ID NO: 5355 - DNA, 201 bp, Homo sapiens
tatatacatatgacatatatattaaaatgtaggaagaaaaatgtttgagtacctgatgaaaatgaatagagagtatgtaatctttgaaagctgaatactgygtgttctcacttataagtgggagctaaataatgtatacacatggacacaccagagtgtagaataatagacactggagacttggaagagttggagggttgg

SEQ ID NO: 5356 - DNA, 201 bp, Homo sapiens
gtacaatttttaagcatttgcagctgcaactctatagacttttgacaaattctttttcacactgatgtagataacagcttaacatttacatagttcttackacttgccacacactgttctaagtggtatatacatatgacatatatattaaaatgtaggaagaaaaatgtttgagtacctgatgaaaatgaatagagagta

SEQ ID NO: 5357 - DNA, 201 bp, Homo sapiens
agggaaataaacttattggaaaattcaaacggacagacaatggaaacgaactgaatactgtccgagaaattataggtgatgaactagtccagacttatgtrtatgaaggagtagaagccaaaaggatctttaaaaaggattgagcattattcttggcgcacagtccaaaatacaaattggacagaagatctatattgtacc

SEQ ID NO: 5358 - DNA, 201 bp, Homo sapiens
ttctaagtggtatatacatatgacatatatattaaaatgtaggaagaaaaatgtttgagtacctgatgaaaatgaatagagagtatgtaatctttgaaagstgaatactgcgtgttctcacttataagtgggagctaaataatgtatacacatggacacaccagagtgtagaataatagacactggagacttggaagagtt

SEQ ID NO: 5359 - DNA, 201 bp, Homo sapiens
tgacaattacacaagaaggaaataaattcacagtcaaagaatcaagcgcttttcgaaacattgaagttgtttttgaacttggtgtcacctttaattacaayctagcagacggaactgaactcagggggacctggagccttgagggaaataaacttattggaaaattcaaacggacagacaatggaaacgaactgaatactg

SEQ ID NO: 5360 - DNA, 201 bp, Homo sapiens
aatgggtgttaatatagtgaaaaggaagcttgcagctcatgacaatttgaagctgacaattacacaagaaggaaataaattcacagtcaaagaatcaagcrcttttcgaaacattgaagttgtttttgaacttggtgtcacctttaattacaatctagcagacggaactgaactcagggggacctggagccttgagggaaa

SEQ ID NO: 5361 - DNA, 201 bp, Homo sapiens
tgtagacagtcccgtgccccgcagggccactgactggagaggggtgccctctgagatcgacgctgccttccaggatgctgatggctatgcctacttcctgygcggccgcctctactggaagtttgaccctgtgaaggtgaaggctctggaaggcttcccccgtctcgtgggtcctgacttctttggctgtgccgagcctgc

SEQ ID NO: 5362 - DNA, 201 bp, Homo sapiens
cctgccagcagcctcaggcctccccgctgtggcgtgcccgacccatctgatgggctgagtgcccgcaaccgacagaagaggttcgtgctttctggcgggcsctgggagaagacggacctcacctacaggatccttcggttcccatggcagttggtgcaggagcaggtgcggcagacgatggcagaggccctaaaggtatgg

SEQ ID NO: 5363 - DNA, 201 bp, Homo sapiens
gcctggctccgcagcgcggccgcgcgcgccctcctgcccccgatgctgctgctgctgctccagccgccgccgctgctggcccgggctctgccgccggacgyccaccacctccatgccgagaggagggggccacagccctggcatgcagccctgcccagtagcccggcacctgcccctgccacgcaggaagccccccggcct

SEQ ID NO: 5364 - DNA, 201 bp, Homo sapiens
gccctgtggacgctgccttcgaggatgcccagggccacatttggttcttccaaggtgctcagtactgggtgtacgacggtgaaaagccagtcctgggcccygcacccctcaccgagctgggcctggtgaggttcccggtccatgctgccttggtctggggtcccgagaagaacaagatctacttcttccgaggcagggact

SEQ ID NO: 5365 - DNA, 201 bp, Homo sapiens
ctgccttcgaggatgcccagggccacatttggttcttccaaggtgctcagtactgggtgtacgacggtgaaaagccagtcctgggccccgcacccctcacmgagctgggcctggtgaggttcccggtccatgctgccttggtctggggtcccgagaagaacaagatctacttcttccgaggcagggactactggcgtttcc

SEQ ID NO: 5366 - DNA, 201 bp, Homo sapiens
  misc_feature (1)...(201): n = A,T,C or G, or insertion/deletion polymorphism (see Tables 1-2)
catgtcaccagcttcagccatgccccccccagtagccgaggaggctgcagcatcaagatggaaccagagccagcagagcctctcgctgcagcagtggaagnggccaatggggctgagcagacccgagtgaacaaagcaccagaagggcggagccctctgagcgctgaggagctgatgactattgaggatgaaggagtcttg

SEQ ID NO: 5367 - DNA, 201 bp, Homo sapiens
cactggggatctcaccagaaaggaaccgacggagctaggggccagcgagatggcggacgaggccttagctgggctggatgagggagcccttcggaagctgstggaggtcacagcagatctggcagagcggcggcgcatccgctcagccatccgggaactgcagcggcaggagctggagcgcgaggaggaggccctggcatc

SEQ ID NO: 5368 - DNA, 181 bp, Homo sapiens
gcggcaagaatgtctagcctgcccgcccgcatggccagccagtggcaagctgccgcccccactctccgggcaccgtctcctgcctgtgcgtccgcccaccrctgccctgtctgttgcgacaccctcccccccacatacacacgcagcgttttgataaattattggttttcaacgatcctga

SEQ ID NO: 5369 - DNA, 201 bp, Homo sapiens
ccgggctgcacttcgtgagctccgacaaaggaagagagaccagcgggacaaggagcgggaacggcggctgcaggaggcacggggccggccaggggaggggygcggcaacacagccactgagaccaccacgaggcacagccagcgggcagctgatggctctgctgtcagcactgttaccaagactgagcggctcgtccactc

SEQ ID NO: 5370 - DNA, 201 bp, Homo sapiens
agctgaggttccaggcagcccagagccaccccccagcccacccaagaccaccagccctgagcctcaggagtctccaacgctccccagcactgagggccagktggtcaacaagcttctgtctggccccaaagagacccctgctgcccagagccccaccagaggcccctctgacaccaagagagcagacgtggctggaccccg

SEQ ID NO: 5371 - DNA, 201 bp, Homo sapiens
acggccgtggccaggcctccacaggccgggtgctgctgcccacaggcaaccagagggcagaactgacactggggctgcgggcgcccccgaccctactcagyaccagtagtgggggcaagagcaccatcacccgtgtcaacagccctgggaccctggctcggctgggcagtgtcactcatgtcaccagcttcagccatgccc

SEQ ID NO: 5372 - DNA, 201 bp, Homo sapiens
gagcctcaggagtctccaacgctccccagcactgagggccaggtggtcaacaagcttctgtctggccccaaagagacccctgctgcccagagccccaccaraggcccctctgacaccaagagagcagacgtggctggaccccgaccctgccaacgctccctgtcggtgctcagcccccgccaaccagcccagaaccgagag

SEQ ID NO: 5373 - DNA, 201 bp, Homo sapiens
ctggaaccagagaccccctaccctgggtttgaattctctgagctggtgacaggtgccacaggcactggggatctcaccagaaaggaaccgacggagctagrggccagcgagatggcggacgaggccttagctgggctggatgagggagcccttcggaagctgctggaggtcacagcagatctggcagagcggcggcgcatc

SEQ ID NO: 5374 - DNA, 201 bp, Homo sapiens
cagccctgggaccctggctcggctgggcagtgtcactcatgtcaccagcttcagccatgccccccccagtagccgaggaggctgcagcatcaagatggaascagagccagcagagcctctcgctgcagcagtggaagcggccaatggggctgagcagacccgagtgaacaaagcaccagaagggcggagccctctgagcgc

SEQ ID NO: 5375 - DNA, 201 bp, Homo sapiens
ttcaccatcgagatcaaggacggccgtggccaggcctccacaggccgggtgctgctgcccacaggcaaccagagggcagaactgacactggggctgcgggygcccccgaccctactcagcaccagtagtgggggcaagagcaccatcacccgtgtcaacagccctgggaccctggctcggctgggcagtgtcactcatgtc

SEQ ID NO: 5376 - DNA, 201 bp, Homo sapiens
caccagaagggcggagccctctgagcgctgaggagctgatgactattgaggatgaaggagtcttggacaagatgctggatcagagcacggactttgaagarcggaagctcatccgggctgcacttcgtgagctccgacaaaggaagagagaccagcgggacaaggagcgggaacggcggctgcaggaggcacggggccggc

SEQ ID NO: 5377 - DNA, 201 bp, Homo sapiens
tgcgacgccacgaactgcgcctgcgcggcaagaatgtctagcctgcccgcccgcatggccagccagtggcaagctgccgcccccactctccgggcaccgtytcctgcctgtgcgtccgcccaccgctgccctgtctgttgcgacaccctcccccccacatacacacgcagcgttttgataaattattggttttcaacgatc

SEQ ID NO: 5378 - DNA, 201 bp, Homo sapiens
gctgctaggccccttgaaaacagagcaggggggcctgtggcacgttcagaggagcctggtgccccgctgcccgtggccgtcggcactgccgagccaggggrcagtatgaagaccacattcaccatcgagatcaaggacggccgtggccaggcctccacaggccgggtgctgctgcccacaggcaaccagagggcagaactg

SEQ ID NO: 5379 - DNA, 201 bp, Homo sapiens
tctcagggcttggaaggtagaagcatgctacaagaaggcaatgtctgttcaaaggtttagacaggatgagagtccatcccaggccacacagcagactggcrgccaagctggcagggctggaaccagagaccccctaccctgggtttgaattctctgagctggtgacaggtgccacaggcactggggatctcaccagaaagg

SEQ ID NO: 5380 - DNA, 201 bp, Homo sapiens; identical to SEQ ID NO: 5366
  misc_feature (1)...(201): n = A,T,C or G, or insertion/deletion polymorphism (see Tables 1-2)

SEQ ID NO: 5381 - DNA, 201 bp, Homo sapiens; identical to SEQ ID NO: 5367

SEQ ID NO: 5382 - DNA, 181 bp, Homo sapiens; identical to SEQ ID NO: 5368

SEQ ID NO: 5383 - DNA, 201 bp, Homo sapiens; identical to SEQ ID NO: 5369

SEQ ID NO: 5384 - DNA, 201 bp, Homo sapiens; identical to SEQ ID NO: 5370

SEQ ID NO: 5385 - DNA, 201 bp, Homo sapiens; identical to SEQ ID NO: 5371

SEQ ID NO: 5386 - DNA, 201 bp, Homo sapiens; identical to SEQ ID NO: 5372

SEQ ID NO: 5387 - DNA, 201 bp, Homo sapiens; identical to SEQ ID NO: 5373

SEQ ID NO: 5388 - DNA, 201 bp, Homo sapiens; identical to SEQ ID NO: 5374

SEQ ID NO: 5389 - DNA, 201 bp, Homo sapiens; identical to SEQ ID NO: 5375

SEQ ID NO: 5390 - DNA, 201 bp, Homo sapiens; identical to SEQ ID NO: 5376

SEQ ID NO: 5391 - DNA, 201 bp, Homo sapiens; identical to SEQ ID NO: 5377

SEQ ID NO: 5392 - DNA, 201 bp, Homo sapiens; identical to SEQ ID NO: 5378

SEQ ID NO: 5393 - DNA, 201 bp, Homo sapiens; identical to SEQ ID NO: 5379

SEQ ID NO: 5394 - DNA, 201 bp, Homo sapiens; identical to SEQ ID NO: 5366
  misc_feature (1)...(201): n = A,T,C or G, or insertion/deletion polymorphism (see Tables 1-2)

SEQ ID NO: 5395 - DNA, 201 bp, Homo sapiens; identical to SEQ ID NO: 5367

SEQ ID NO: 5396 - DNA, 181 bp, Homo sapiens; identical to SEQ ID NO: 5368

SEQ ID NO: 5397 - DNA, 201 bp, Homo sapiens; identical to SEQ ID NO: 5369

SEQ ID NO: 5398 - DNA, 201 bp, Homo sapiens; identical to SEQ ID NO: 5370

SEQ ID NO: 5399 - DNA, 159 bp, Homo sapiens
cgcagaatccaggggacggttgctgagcgggcctgggacagcgggtcgcggcacctccsgcctgcgcgtgtctaatccgtctgtcgggtcccgaaagagctaagccgagcctgcgccggacgggtgggctggactgagagaattctctgagctggtgac

SEQ ID NO: 5400 - DNA, 201 bp, Homo sapiens; identical to SEQ ID NO: 5371

SEQ ID NO: 5401 - DNA, 201 bp, Homo sapiens; identical to SEQ ID NO: 5372

SEQ ID NO: 5402 - DNA, 201 bp, Homo sapiens
cctgcgccggacgggtgggctggactgagagaattctctgagctggtgacaggtgccacaggcactggggatctcaccagaaaggaaccgacggagctagrggccagcgagatggcggacgaggccttagctgggctggatgagggagcccttcggaagctgctggaggtcacagcagatctggcagagcggcggcgcatc

SEQ ID NO: 5403 - DNA, 201 bp, Homo sapiens; identical to SEQ ID NO: 5374

SEQ ID NO: 5404 - DNA, 201 bp, Homo sapiens; identical to SEQ ID NO: 5375

SEQ ID NO: 5405 - DNA, 201 bp, Homo sapiens; identical to SEQ ID NO: 5376

SEQ ID NO: 5406 - DNA, 201 bp, Homo sapiens; identical to SEQ ID NO: 5377

SEQ ID NO: 5407 - DNA, 201 bp, Homo sapiens; identical to SEQ ID NO: 5378

SEQ ID NO: 5408 - DNA, 201 bp, Homo sapiens; identical to SEQ ID NO: 5366
  misc_feature (1)...(201): n = A,T,C or G, or insertion/deletion polymorphism (see Tables 1-2)

SEQ ID NO: 5409 - DNA, 201 bp, Homo sapiens; identical to SEQ ID NO: 5367

SEQ ID NO: 5410 - DNA, 181 bp, Homo sapiens; identical to SEQ ID NO: 5368

SEQ ID NO: 5411 - DNA, 201 bp, Homo sapiens; identical to SEQ ID NO: 5369

SEQ ID NO: 5412 - DNA, 201 bp, Homo sapiens; identical to SEQ ID NO: 5370

SEQ ID NO: 5413 - DNA, 159 bp, Homo sapiens; identical to SEQ ID NO: 5399

SEQ ID NO: 5414 - DNA, 201 bp, Homo sapiens; identical to SEQ ID NO: 5371

SEQ ID NO: 5415 - DNA, 201 bp, Homo sapiens; identical to SEQ ID NO: 5372

SEQ ID NO: 5416 - DNA, 201 bp, Homo sapiens; identical to SEQ ID NO: 5402

SEQ ID NO: 5417 - DNA, 201 bp, Homo sapiens; identical to SEQ ID NO: 5374

SEQ ID NO: 5418 - DNA, 201 bp, Homo sapiens; identical to SEQ ID NO: 5375

SEQ ID NO: 5419 - DNA, 201 bp, Homo sapiens; identical to SEQ ID NO: 5376

SEQ ID NO: 5420 - DNA, 201 bp, Homo sapiens; identical to SEQ ID NO: 5377

SEQ ID NO: 5421 - DNA, 201 bp, Homo sapiens; identical to SEQ ID NO: 5378

SEQ ID NO: 5422 - DNA, 201 bp, Homo sapiens; identical to SEQ ID NO: 5366
  misc_feature (1)...(201): n = A,T,C or G, or insertion/deletion polymorphism (see Tables 1-2)

SEQ ID NO: 5423 - DNA, 201 bp, Homo sapiens; identical to SEQ ID NO: 5367

SEQ ID NO: 5424 - DNA, 181 bp, Homo sapiens; identical to SEQ ID NO: 5368

SEQ ID NO: 5425 - DNA, 201 bp, Homo sapiens; identical to SEQ ID NO: 5369

SEQ ID NO: 5426 - DNA, 201 bp, Homo sapiens; identical to SEQ ID NO: 5370

SEQ ID NO: 5427 - DNA, 201 bp, Homo sapiens; identical to SEQ ID NO: 5371

SEQ ID NO: 5428 - DNA, 201 bp, Homo sapiens; identical to SEQ ID NO: 5372

SEQ ID NO: 5429 - DNA, 201 bp, Homo sapiens; identical to SEQ ID NO: 5373

SEQ ID NO: 5430 - DNA, 201 bp, Homo sapiens; identical to SEQ ID NO: 5374

SEQ ID NO: 5431 - DNA, 201 bp, Homo sapiens; identical to SEQ ID NO: 5375

SEQ ID NO: 5432 - DNA, 201 bp, Homo sapiens; identical to SEQ ID NO: 5376

SEQ ID NO: 5433 - DNA, 201 bp, Homo sapiens; identical to SEQ ID NO: 5377

SEQ ID NO: 5434 - DNA, 201 bp, Homo sapiens; identical to SEQ ID NO: 5378

SEQ ID NO: 5435 - DNA, 201 bp, Homo sapiens; identical to SEQ ID NO: 5379

SEQ ID NO: 5436 - DNA, 201 bp, Homo sapiens; identical to SEQ ID NO: 5366
  misc_feature (1)...(201): n = A,T,C or G, or insertion/deletion polymorphism (see Tables 1-2)

SEQ ID NO: 5437 - DNA, 201 bp, Homo sapiens; identical to SEQ ID NO: 5367

SEQ ID NO: 5438 - DNA, 181 bp, Homo sapiens; identical to SEQ ID NO: 5368

SEQ ID NO: 5439 - DNA, 201 bp, Homo sapiens; identical to SEQ ID NO: 5369

SEQ ID NO: 5440 - DNA, 201 bp, Homo sapiens; identical to SEQ ID NO: 5370

SEQ ID NO: 5441 - DNA, 159 bp, Homo sapiens; identical to SEQ ID NO: 5399

SEQ ID NO: 5442 - DNA, 201 bp, Homo sapiens; identical to SEQ ID NO: 5371

SEQ ID NO: 5443 - DNA, 201 bp, Homo sapiens; identical to SEQ ID NO: 5372

SEQ ID NO: 5444 - DNA, 201 bp, Homo sapiens; identical to SEQ ID NO: 5402

SEQ ID NO: 5445 - DNA, 201 bp, Homo sapiens; identical to SEQ ID NO: 5374

SEQ ID NO: 5446 - DNA, 201 bp, Homo sapiens; identical to SEQ ID NO: 5375

SEQ ID NO: 5447 - DNA, 201 bp, Homo sapiens; identical to SEQ ID NO: 5376

SEQ ID NO: 5448 - DNA, 201 bp, Homo sapiens; identical to SEQ ID NO: 5377

SEQ ID NO: 5449 - DNA, 201 bp, Homo sapiens; identical to SEQ ID NO: 5378

SEQ ID NO: 5450 - DNA, 201 bp, Homo sapiens
actttggcatttctgtagctgagcacagcaggggaggggttaatgcagatggcaagtgcaccaaggagaaggcaggaatgctggagcctggaataagggargagaggggactggagagtgtggggaataggaagaagaaatttcctttagactaacgaatatattggggggaggaatagaggggaggtgtgcaggaaccag

SEQ ID NO: 5451 - DNA, 201 bp, Homo sapiens
aagccacacaaaccattgggagtgaaatccgtgccatcaggcaagccagagccagggcccgactccctgtgaccacctggcgaatctcagctggaagtggwggtcaagcagagagaacgattgcaggcaccacccgggcagtgagcagaggagcccggatcctgagtgcgaccacttcaggcatcttccttgcactggatg

SEQ ID NO: 5452 - DNA, 201 bp, Homo sapiens
cgtctgctgtgactgggatcaccaccagcatcgtggagcactcatacacatcatcagcagaagctgaagccagcaggctgactgcaaccagcattgaccgmttgaaggtatttaaggaagttatgcgtgacatcacacccaacttactttcccttcttaataattattacgaagccacacaaaccattgggagtgaaatcc

SEQ ID NO: 5453 - DNA, 201 bp, Homo sapiens
agaaacgctttactgaagaggccaccaaatacttccgggagagagtcagcccagtgcatctgcaaatcctgctgactaacaatgaagcctggaagagattygtgactgcggctgaattgcccagggatgaggcagatgctctctacgaagctctgaagaagcttagaacatatgcagctattgaggacgaatatgtgcagc

SEQ ID NO: 5454 - DNA, 201 bp, Homo sapiens
ttacagcagggacgagtctggcccttactgcagctggggtagggctgggagcagcgtctgctgtgactgggatcaccaccagcatcgtggagcactcatayacatcatcagcagaagctgaagccagcaggctgactgcaaccagcattgaccgattgaaggtatttaaggaagttatgcgtgacatcacacccaacttac

SEQ ID NO: 5455 - DNA, 201 bp, Homo sapiens
tggcatcatgtcccttgctggtcttgttttggcaccatttacagcagggacgagtctggcccttactgcagctggggtagggctgggagcagcgtctgctrtgactgggatcaccaccagcatcgtggagcactcatacacatcatcagcagaagctgaagccagcaggctgactgcaaccagcattgaccgattgaaggt

SEQ ID NO: 5456 - DNA, 201 bp, Homo sapiens
aaataccagctggctggggcccaggagattaaaaaacaccgggctagggttaagaaaaaaaacgaacccttccagtcaggtcagtgactggagagctccawggaaagtctctcagtgacctggctgctggcaccatggactcagaaaagaaacgctttactgaagaggccaccaaatacttccgggagagagtcagcccag

SEQ ID NO: 5457 - DNA, 201 bp, Homo sapiens
ggtggggctgggaagcatcctgttttgcatgtttgatcaggagctgctgccaagttgtgactttcactttcccttttgggttccagggtatatctcagagmctggagaacgtgtctggttattatgcagatgcacggctggaggtgggatccacacagctcagaacagctggatcttgctcacactctttcaagagaagct

SEQ ID NO: 5458 - DNA, 201 bp, Homo sapiens
tgtgactttcactttcccttttgggttccagggtatatctcagagactggagaacgtgtctggttattatgcagatgcacggctggaggtgggatccacayagctcagaacagctggatcttgctcacactctttcaagagaagcttccttggacaaaaggaccctgccttggtgtgagagtgagggcagagggagctgga

SEQ ID NO: 5459 - DNA, 201 bp, Homo sapiens
agtttccccaagtcaagaggaagatccaggagtccatagaaaagcttcgtgcccttgcaaatggtattgaagaggtccacagaggctgcaccatctccaaygtggtgtccagctccactggcgctgcctctggcatcatgtcccttgctggtcttgttttggcaccatttacagcagggacgagtctggcccttactgcag

SEQ ID NO: 5460 - DNA, 201 bp, Homo sapiens; identical to SEQ ID NO: 5450

SEQ ID NO: 5461 - DNA, 201 bp, Homo sapiens; identical to SEQ ID NO: 5451

SEQ ID NO: 5462 - DNA, 201 bp, Homo sapiens; identical to SEQ ID NO: 5452

SEQ ID NO: 5463 - DNA, 201 bp, Homo sapiens; identical to SEQ ID NO: 5453

SEQ ID NO: 5464 - DNA, 201 bp, Homo sapiens; identical to SEQ ID NO: 5454

SEQ ID NO: 5465 - DNA, 201 bp, Homo sapiens; identical to SEQ ID NO: 5455

SEQ ID NO: 5466 - DNA, 201 bp, Homo sapiens
cagaacagctggatcttgctcacactctttcaagagaagcttccttgggttaagaaaaaaaacgaacccttccagtcaggtcagtgactggagagctccawggaaagtctctcagtgacctggctgctggcaccatggactcagaaaagaaacgctttactgaagaggccaccaaatacttccgggagagagtcagcccag

SEQ ID NO: 5467 - DNA, 201 bp, Homo sapiens; identical to SEQ ID NO: 5457

SEQ ID NO: 5468 - DNA, 201 bp, Homo sapiens
tgtgactttcactttcccttttgggttccagggtatatctcagagactggagaacgtgtctggttattatgcagatgcacggctggaggtgggatccacayagctcagaacagctggatcttgctcacactctttcaagagaagcttccttgggttaagaaaaaaaacgaacccttccagtcaggtcagtgactggagagc

SEQ ID NO: 5469 - DNA, 201 bp, Homo sapiens; identical to SEQ ID NO: 5459

SEQ ID NO: 5470 - DNA, 201 bp, Homo sapiens; identical to SEQ ID NO: 5450

SEQ ID NO: 5471 - DNA, 201 bp, Homo sapiens; identical to SEQ ID NO: 5451

SEQ ID NO: 5472 - DNA, 201 bp, Homo sapiens; identical to SEQ ID NO: 5452

SEQ ID NO: 5473 - DNA, 201 bp, Homo sapiens; identical to SEQ ID NO: 5453

SEQ ID NO: 5474 - DNA, 201 bp, Homo sapiens; identical to SEQ ID NO: 5454

SEQ ID NO: 5475 - DNA, 201 bp, Homo sapiens; identical to SEQ ID NO: 5457

SEQ ID NO: 5476 - DNA, 201 bp, Homo sapiens; identical to SEQ ID NO: 5455

SEQ ID NO: 5477 - DNA, 201 bp, Homo sapiens
tgtgactttcactttcccttttgggttccagggtatatctcagagactggagaacgtgtctggttattatgcagatgcacggctggaggtgggatccacayagctcagaacagctggatcttgctcacactctttcaagagaagcttccttgaaaagaaacgctttactgaagaggccaccaaatacttccgggagagagt

SEQ ID NO: 5478 - DNA, 201 bp, Homo sapiens; identical to SEQ ID NO: 5459

SEQ ID NO: 5479 - DNA, 201 bp, Homo sapiens; identical to SEQ ID NO: 5450

SEQ ID NO: 5480 - DNA, 201 bp, Homo sapiens; identical to SEQ ID NO: 5451

SEQ ID NO: 5481 - DNA, 201 bp, Homo sapiens; identical to SEQ ID NO: 5452

SEQ ID NO: 5482 - DNA, 201 bp, Homo sapiens; identical to SEQ ID NO: 5453

SEQ ID NO: 5483 - DNA, 201 bp, Homo sapiens; identical to SEQ ID NO: 5454

SEQ ID NO: 5484 - DNA, 201 bp, Homo sapiens; identical to SEQ ID NO: 5455

SEQ ID NO: 5485 - DNA, 201 bp, Homo sapiens
acaggtggctcacattcagtcccacaatttgctttctcctcctcaagggttaagaaaaaaaacgaacccttccagtcaggtcagtgactggagagctccawggaaagtctctcagtgacctggctgctggcaccatggactcagaaaagaaacgctttactgaagaggccaccaaatacttccgggagagagtcagcccag

SEQ ID NO: 5486 - DNA, 201 bp, Homo sapiens; identical to SEQ ID NO: 5457

SEQ ID NO: 5487 - DNA, 201 bp, Homo sapiens; identical to SEQ ID NO: 5458

SEQ ID NO: 5488 - DNA, 201 bp, Homo sapiens; identical to SEQ ID NO: 5459

SEQ ID NO: 5489 - DNA, 201 bp, Homo sapiens
agtggttcaacttaaaccatgtttcaactttacaattggtctgttggggtattaaatgaatttgtgacttaggatattttcatttatgatgggtttatcargaagtaaccccatggtaagttgaggcatatctgtatatatttaaacctaattaattcttgagctgaaaataaataaaccaggatggcagggaccaacccc

SEQ ID NO: 5490 - DNA, 201 bp, Homo sapiens
gccagcagatgattgttaagctgggtggtggcactgccattgccgcctcctgaccaccaggctcagcccacccctccacctctctctcgatttctctctcyccccctcagcatcttcccgctgagagtggtggggaagagccttgtcttcttagctgtcacctgccgaggcttctgggccactcaggccagtgcacccctg

SEQ ID NO: 5491 - DNA, 201 bp, Homo sapiens
ccagtgatccggccacactcgcgctcctcggtcaccttctggaggcaccggaaacaggcagatctggatctcgccagaggagattttgcagctgctgccgscaacctacaaacctgcctggcagttttgggccgggcactgcccacctcccgcctggacctggcctgcagcctctcctggaacgtgatccgctacagcctg

SEQ ID NO: 5492 - DNA, 201 bp, Homo sapiens
aacggtcattcacccaggtcacattaccttccttctctccctcggcggcctccccacaggctccaactctgcaagtcaaggtttctcccacctcagttccmaccacacccagggcaactcctattcttcagccccgcccccagccccagcctcaacctcaaactcagctgcaacaacagacggtaatgatcacgccaacat

SEQ ID NO: 5493 - DNA, 201 bp, Homo sapiens
aggaagaagagagctgtgaattctccagtgctctggagtacttgaaattacttcattcttttgtggactctgtgggggttatgagccccccactctccagsagctccgtgctcaagtccgccctgggtccagacatcatctgtcggtggtggacgtctgcaatcactgtggccatcagctggctccagggagacgatgcag

SEQ ID NO: 5494 - DNA, 201 bp, Homo sapiens
atgcccatggtccagggcctggtgggcgtgagaggataggtggcagggcagaaactgggcagccctgacttgatagcagcagggggagctcccaagctgcyaagcccctgcctccagccttcctgagtttctctctcctgaaccctactctctcctttttgcttcctcagtttttatcaggctttctctgggggacagcag

SEQ ID NO: 5495 - DNA, 201 bp, Homo sapiens
tggtccagcctcagatcatcaagacagattcccttgttttgaccacactgaagacagatggcagccctgttatggctgcggtccagaacccggccctcacygccctcaccacccctatccagacggctgcccttcaagtaccaaccctggtgggcagcagtgggaccattctgaccacaatgcctgtaatgatggggcaag

SEQ ID NO: 5496 - DNA, 201 bp, Homo sapiens
ccgcccagcataccgcaaggtgttcctgcatgaagccaccgtgcgcctgatggcaggagccagccccacccgcacccaccagctgctggaacacagcctgmggcggcgcaccacgcagagcaccaagcacggagaggtggatgcctggcccggccagcgagagcgggccaccgccatcctgctggcctgccgccacctgcc

SEQ ID NO: 5497 - DNA, 201 bp, Homo sapiens
ttttgcagctgctgccggcaacctacaaacctgcctggcagttttgggccgggcactgcccacctcccgcctggacctggcctgcagcctctcctggaacrtgatccgctacagcctgcagaagctacgcctggtgcgctggctgctcaagaaagtcttccagtgccggcgggccacgccagccactgaggcaggctttga

SEQ ID NO: 5498 - DNA, 201 bp, Homo sapiens
cgcctggacctggcctgcagcctctcctggaacgtgatccgctacagcctgcagaagctacgcctggtgcgctggctgctcaagaaagtcttccagtgccrgcgggccacgccagccactgaggcaggctttgaagacgaagctaagaccagcgcccgggatgcggctctggcctatcaccggctgcaccagctgcacatc

SEQ ID NO: 5499 - DNA, 201 bp, Homo sapiens
cattcgagtcaggttctgggggctggtttgactggatgatgcctactcttctcttatggctggtaaatggtgtgattgtcctgagcgtctttgtgaagctkctggttcatggggagccagtgatccggccacactcgcgctcctcggtcaccttctggaggcaccggaaacaggcagatctggatctcgccagaggagatt

SEQ ID NO: 5500 - DNA, 201 bp, Homo sapiens
agcagcaggtgcagacagtacaggcccagcgggtgctgacacaaacggccaatggcacgctgcagacccttgccccggctacggtgcagacagttgctgcrccacaggtgcagcaggtcccggtcctggtccagcctcagatcatcaagacagattcccttgttttgaccacactgaagacagatggcagccctgttatgg

SEQ ID NO: 5501 - DNA, 201 bp, Homo sapiens
gttttcagaacagctgtgtagctcctttcctggcagtggtggtagtggtagcagcagcggcagcagtggcagcagcagcagcagcagcaatggcaggggcmgcagcagcggagctgtggacccttcagtgcaacggtcattcacccaggtcacattaccttccttctctccctcggcggcctccccacaggctccaactct

SEQ ID NO: 5502 - DNA, 201 bp, Homo sapiens
ccattgccgcctcctgaccaccaggctcagcccacccctccacctctctctcgatttctctctctccccctcagcatcttcccgctgagagtggtggggargagccttgtcttcttagctgtcacctgccgaggcttctgggccactcaggccagtgcacccctgggcagagccccttaaagctgctgtcactagatgccc

SEQ ID NO: 5503 - DNA, 201 bp, Homo sapiens; identical to SEQ ID NO: 5489

SEQ ID NO: 5504 - DNA, 201 bp, Homo sapiens
ggttgcctatggtgggcactaggaatgaggtcccctgcctcgatgcgggtcctaggagaaaaagtcctacttttctgggtccccaggtgcagcacctcccrgagactgtttctcccatggcctcctgagtgatgggccctgcctccctgtgcctcatcctcaggctggttggagcagagggtgggcaggagccccagcaca

SEQ ID NO: 5505 - DNA, 201 bp, Homo sapiens; identical to SEQ ID NO: 5490

SEQ ID NO: 5506 - DNA, 201 bp, Homo sapiens; identical to SEQ ID NO: 5491

SEQ ID NO: 5507 - DNA, 201 bp, Homo sapiens; identical to SEQ ID NO: 5492

SEQ ID NO: 5508 - DNA, 201 bp, Homo sapiens; identical to SEQ ID NO: 5493

SEQ ID NO: 5509 - DNA, 201 bp, Homo sapiens; identical to SEQ ID NO: 5494

SEQ ID NO: 5510 - DNA, 201 bp, Homo sapiens; identical to SEQ ID NO: 5495

SEQ ID NO: 5511 - DNA, 201 bp, Homo sapiens; identical to SEQ ID NO: 5496

SEQ ID NO: 5512 - DNA, 201 bp, Homo sapiens; identical to SEQ ID NO: 5497

SEQ ID NO: 5513 - DNA, 201 bp, Homo sapiens; identical to SEQ ID NO: 5498

SEQ ID NO: 5514 - DNA, 201 bp, Homo sapiens; identical to SEQ ID NO: 5499

SEQ ID NO: 5515 - DNA, 201 bp, Homo sapiens; identical to SEQ ID NO: 5500

SEQ ID NO: 5516 - DNA, 201 bp, Homo sapiens; identical to SEQ ID NO: 5501

SEQ ID NO: 5517 - DNA, 201 bp, Homo sapiens; identical to SEQ ID NO: 5502

SEQ ID NO: 5518 - DNA, 201 bp, Homo sapiens
cgcagctctggttcctgttgcggccggtctctaattaacagaagatggcaaagcccagccacagcagctatgtccttcagcagctaaacaaccaaagagartggggttttctctgtgactgctgtattgcaattgatgacatttactttcaagcacacaaggcagttctagctgcctgtagctcctattttagaatgtttt

SEQ ID NO: 5519 - DNA, 201 bp, Homo sapiens
acccactgaagggttcaaatacatgtgaattctactgctttaagagaaataaaacaaataagcctagggaaatattagagtctaaaaaaccctagagttamtctcttttgggaacataaggaggtatacagaactgcagacctctaaacataagtaggaaaaagaaaaataaaagaatattaccaataattaaaggtgcca

SEQ ID NO: 5520 - DNA, 201 bp, Homo sapiens
aagccaacaggtggtgtgcagagccaagttcaacggtaaatacaccacataatagagaggctgatgaagagtctttacaattaggtaattttcctgagccrctatttgatgtatgtaaaaaaagttccgtgtccaaattatctactccaaaagaacgtgtgtcaagacgctttgggcggagttttacctgtgatagctgtg

SEQ ID NO: 5521 - DNA, 201 bp, Homo sapiens
tatctactccaaaagaacgtgtgtcaagacgctttgggcggagttttacctgtgatagctgtggatttggctttagctgtgaaaaattattagatgagcaygtgctaacctgtactaacagacatttataccaaaacacaagatcttaccatagaatagtagatattagagatggaaaagacagtaacatcaaagctgaat

SEQ ID NO: 5522 - DNA, 201 bp, Homo sapiens
cacaaagacagcaaatcacccaccttgaggtcataaaggagctggaagctgctgggtgcttgtgctgctctctggacggcctgagccagggctaaggcacmcttgcccccttctgcccagtgagtgcacttcacggcatcaaaagccccatgttctctggaaaggcggctgatgaggtccagctcagactctgtatccgtc

SEQ ID NO: 5523 - DNA, 201 bp, Homo sapiens
aagcccaatctcatgcagacactggagggcactccagtgtttgtccatgctggcccgtttgccaacatcgcacatggcaattcctccatcattgcagaccrgatcgcactcaagcttgttggcccagaagggtttgtagtgacggaagcaggatttggagcagacattggaatggaaaagttttttaacatcaaatgccgg

SEQ ID NO: 5524 - DNA, 201 bp, Homo sapiens
agcatcaatgctgggagacttgctagaggtgacctcaatgactgtttcattccttgtacgcctaagggatgcttggaactcatcaaagagacaggggtgcygattgccggaaggcatgctgtggtggttgggcgcagtaaaatagttggggccccgatgcatgacttgcttctgtggaacaatgccacagtgaccacctgc

SEQ ID NO: 5525 - DNA, 201 bp, Homo sapiens
gacggatacagagtctgagctggacctcatcagccgcctttccagagaacatggggcttttgatgccgtgaagtgcactcactgggcagaagggggcaagkgtgccttagccctggctcaggccgtccagagagcagcacaagcacccagcagcttccagctcctttatgacctcaagctcccagttgaggataaaatcag

SEQ ID NO: 5526 - DNA, 201 bp, Homo sapiens
gccagcgttggggctggttttctgtaccccttagtaggaacgatgagcacaatgcctggactccccacccggccctgtttttatgatattgatttggaccytgaaacagaacaggtgaatggattattctaaacagacttccctgaggggagaggggatagtaatgagagttggcaataaccaatgaattgaaatatttat

SEQ ID NO: 5527 - DNA, 201 bp, Homo sapiens
gcttgtcacaggttgacagtgtaggggagaaaactgctgtccaataaactacagaggaaactacaggagagatcaccatccatcttcaagaagctactttraaagtctggccagtgtctattcaggcccactgggagttaggaagtataagtaagccaagagaagtcagcccctgcccagaagatctgaaactaatagtag

SEQ ID NO: 5528 - DNA, 201 bp, Homo sapiens
ccatccatcttcaagaagctactttgaaagtctggccagtgtctattcaggcccactgggagttaggaagtataagtaagccaagagaagtcagcccctgyccagaagatctgaaactaatagtaggagtttccccagaagtcattttcagccttaattctcatcatgtataaattaacataaatcatgcatgtctgttta

SEQ ID NO: 5529 - DNA, 201 bp, Homo sapiens
ctacctttagattcagagaattccattaacactgaagaagtgatcaatgctattgcacccgagaaggatgtggatggattgactagcatcaatgctgggaracttgctagaggtgacctcaatgactgtttcattccttgtacgcctaagggatgcttggaactcatcaaagagacaggggtgccgattgccggaaggcat

SEQ ID NO: 5530 - DNA, 201 bp, Homo sapiens
tgtctattcaggcccactgggagttaggaagtataagtaagccaagagaagtcagcccctgcccagaagatctgaaactaatagtaggagtttccccagamgtcattttcagccttaattctcatcatgtataaattaacataaatcatgcatgtctgtttactttagtgacgttccacagaataaaaggaaacaagtttg

SEQ ID NO: 5531 - DNA, 201 bp, Homo sapiens
gaggccaaagagagggcgagcttcatcactcctgttcctggcggcgtagggcccatgacagttgcaatgctcatgcagagcacagtagagagtgccaagcrtttcctggagaaatttaagccaggaaagtggatgattcagtataacaaccttaacctcaagacacctgttccaagtgacattgatatatcacgatcttgt

SEQ ID NO: 5532 - DNA, 113 bp, Homo sapiens
agtgtgatccccyggccagtccctaagcacgtgggttgggttgtcctgcttggctgcggagggagtggaacctcgatattggtggtgtccatcgtgggcagcggactaataaa

SEQ ID NO: 5533 - DNA, 201 bp, Homo sapiens; identical to SEQ ID NO: 5523

SEQ ID NO: 5534 - DNA, 201 bp, Homo sapiens; identical to SEQ ID NO: 5524

SEQ ID NO: 5535 - DNA, 201 bp, Homo sapiens; identical to SEQ ID NO: 5525

SEQ ID NO: 5536 - DNA, 201 bp, Homo sapiens
gccagcgttggggctggttttctgtaccccttagtaggaacgatgagcacaatgcctggactccccacccggccctgtttttatgatattgatttggaccytgaaacagaacaggtgaatggattattctaaacagatcaccatccatcttcaagaagctactttgaaagtctggccagtgtctattcaggcccactggga

SEQ ID NO: 5537 - DNA, 201 bp, Homo sapiens
cacccggccctgtttttatgatattgatttggaccctgaaacagaacaggtgaatggattattctaaacagatcaccatccatcttcaagaagctactttraaagtctggccagtgtctattcaggcccactgggagttaggaagtataagtaagccaagagaagtcagcccctgcccagaagatctgaaactaatagtag

SEQ ID NO: 5538 - DNA, 201 bp, Homo sapiens; identical to SEQ ID NO: 5528

SEQ ID NO: 5539 - DNA, 201 bp, Homo sapiens; identical to SEQ ID NO: 5529

SEQ ID NO: 5540 - DNA, 201 bp, Homo sapiens; identical to SEQ ID NO: 5530

SEQ ID NO: 5541 - DNA, 201 bp, Homo sapiens; identical to SEQ ID NO: 5531

SEQ ID NO: 5542 - DNA, 113 bp, Homo sapiens; identical to SEQ ID NO: 5532

SEQ ID NO: 5543 - DNA, 201 bp, Homo sapiens
caacctgacctgtcaggtgaagttcgctggagctggtgtgactacggagagaaccatccagctcaacgtcacctatgttccacagaacccaacaactggtmtctttccaggagatggctcagggaaacaagagaccagagcaggagtggttcatggggccattggaggagctggtgttacagccctgctcgctctttgtct

SEQ ID NO: 5544 - DNA, 201 bp, Homo sapiens
gatgaggagctgcattatgcttccctcaactttcatgggatgaatccttccaaggacacctccaccgaatactcagaggtcaggacccagtgaggaacccwcaagagcatcaggctcagctagaagatccacatcctctacaggtcggggaccaaaggctgattcttggagatttaacaccccacaggcaatgggtttata

SEQ ID NO: 5545 - DNA, 201 bp, Homo sapiens
gtcaggacccagtgaggaacccacaagagcatcaggctcagctagaagatccacatcctctacaggtcggggaccaaaggctgattcttggagatttaacwccccacaggcaatgggtttatagacattatgtgagtttcctgctatattaacatcatcttagactttgcaagcagagagtcgtggaatcaaatctgtgct

SEQ ID NO: 5546 - DNA, 201 bp, Homo sapiens
ggtttatagacattatgtgagtttcctgctatattaacatcatcttagactttgcaagcagagagtcgtggaatcaaatctgtgctctttcatttgctaastgtatgatgtcacacaagctccttaaccttccatgtctccattttcttctctgtgaagtaggtataagaagtcctatctcatagggatgctgtgagcatt

SEQ ID NO: 5547 - DNA, 201 bp, Homo sapiens
ggccattggaggagctggtgttacagccctgctcgctctttgtctctgcctcatcttcttcatagtgaagacccacaggaggaaagcagccaggacagcaktgggcaggaatgacacccaccctaccacagggtcagcctccccgaaacaccagaagaagtccaagttacatggccccactgaaacctcaagctgttcagg

SEQ ID NO: 5548 - DNA, 201 bp, Homo sapiens
  misc_feature (1)...(201): n = A,T,C or G, or insertion/deletion polymorphism (see Tables 1-2)
cctgacctgtcaggtgaagttcgctggagctggtgtgactacggagagaaccatccagctcaacgtcacctatgttccacagaacccaacaactggtatcnttccaggagatggctcagggaaacaagagaccagagcaggagtggttcatggggccattggaggagctggtgttacagccctgctcgctctttgtctctg

SEQ ID NO: 5549 - DNA, 201 bp, Homo sapiens
gctcgctctttgtctctgcctcatcttcttcatagtgaagacccacaggaggaaagcagccaggacagcagtgggcaggaatgacacccaccctaccacarggtcagcctccccgaaacaccagaagaagtccaagttacatggccccactgaaacctcaagctgttcaggtgccgcccctactgtggagatggatgagga

SEQ ID NO: 5550 - DNA, 176 bp, Homo sapiens
tagtccttcccctccactcccttcctcttttctgctcacacaggaagccctggaagctgcttcctcagacatgccrctgctgctactgctgcccctgctgtgggcaggggccctggctatggatccaaatttctggctgcaagtgcaggagtcagtgacggtacaggagggtttgt

SEQ ID NO: 5551 - DNA, 201 bp, Homo sapiens
  misc_feature (1)...(201): n = A,T,C or G, or insertion/deletion polymorphism (see Tables 1-2)
gtgcgtcctcgtgccctgcactttcttccatcccataccctactacgacaagaactccccagttcatggttactggttccgggaaggagccattatatccngggactctccagtggccacaaacaagctagatcaagaagtacaggaggagactcagggcagattccgcctccttggggatcccagtaggaacaactgctc

SEQ ID NO: 5552 - DNA, 201 bp, Homo sapiens
cctccactcccttcctcttttctgctcacacaggaagccctggaagctgcttcctcagacatgccgctgctgctactgctgcccctgctgtgggcaggggycctggctatggatccaaatttctggctgcaagtgcaggagtcagtgacggtacaggagggtttgtgcgtcctcgtgccctgcactttcttccatcccata

SEQ ID NO: 5553 - DNA, 201 bp, Homo sapiens
tgggcaggggccctggctatggatccaaatttctggctgcaagtgcaggagtcagtgacggtacaggagggtttgtgcgtcctcgtgccctgcactttctyccatcccataccctactacgacaagaactccccagttcatggttactggttccgggaaggagccattatatccagggactctccagtggccacaaacaag

SEQ ID NO: 5554 - DNA, 201 bp, Homo sapiens
gctcacacaggaagccctggaagctgcttcctcagacatgccgctgctgctactgctgcccctgctgtgggcaggggccctggctatggatccaaatttcyggctgcaagtgcaggagtcagtgacggtacaggagggtttgtgcgtcctcgtgccctgcactttcttccatcccataccctactacgacaagaactcccc

SEQ ID NO: 5555 - DNA, 201 bp, Homo sapiens
agcatcgtagacgccaggaggagggataatggttcatacttctttcggatggagagaggaagtaccaaatacagttacaaatctccccagctctctgtgcrtgtgacagacttgacccacaggcccaaaatcctcatccctggcactctagaacccggccactccaaaaacctgacctgctctgtgtcctgggcctgtgag

SEQ ID NO: 5556 - DNA, 201 bp, Homo sapiens
gatcccagtaggaacaactgctccctgagcatcgtagacgccaggaggagggataatggttcatacttctttcggatggagagaggaagtaccaaatacarttacaaatctccccagctctctgtgcatgtgacagacttgacccacaggcccaaaatcctcatccctggcactctagaacccggccactccaaaaacctg

SEQ ID NO: 5557 - DNA, 201 bp, Homo sapiens
tgttccacagaacccaacaactggtatctttccaggagatggctcagggaaacaagagaccagagcaggagtggttcatggggccattggaggagctggtrttacagccctgctcgctctttgtctctgcctcatcttcttcatagtgaagacccacaggaggaaagcagccaggacagcagtgggcaggaatgacaccca

SEQ ID NO: 5558 - DNA, 201 bp, Homo sapiens
tgacacccaccctaccacagggtcagcctccccgaaacaccagaagaagtccaagttacatggccccactgaaacctcaagctgttcaggtgccgcccctrctgtggagatggatgaggagctgcattatgcttccctcaactttcatgggatgaatccttccaaggacacctccaccgaatactcagaggtcaggaccca

SEQ ID NO: 5559 - DNA, 201 bp, Homo sapiens
cgctctttgtctctgcctcatcttcttcatagtgaagacccacaggaggaaagcagccaggacagcagtgggcaggaatgacacccaccctaccacagggycagcctccccgaaacaccagaagaagtccaagttacatggccccactgaaacctcaagctgttcaggtgccgcccctactgtggagatggatgaggagct

SEQ ID NO: 5560 - DNA, 201 bp, Homo sapiens
caagctgttcaggtgccgcccctactgtggagatggatgaggagctgcattatgcttccctcaactttcatgggatgaatccttccaaggacacctccacygaatactcagaggtcaggacccagtgaggaacccacaagagcatcaggctcagctagaagatccacatcctctacaggtcggggaccaaaggctgattct

SEQ ID NO: 5561 - DNA, 201 bp, Homo sapiens
tctgcctcatcttcttcatagtgaagacccacaggaggaaagcagccaggacagcagtgggcaggaatgacacccaccctaccacagggtcagcctccccyaaacaccagaagaagtccaagttacatggccccactgaaacctcaagctgttcaggtgccgcccctactgtggagatggatgaggagctgcattatgctt

SEQ ID NO: 5562 - DNA, 201 bp, Homo sapiens
ctgtgagcagggaacacccccgatcttctcctggttgtcagctgcccccacctccctgggccccaggactactcactcctcggtgctcataatcaccccayggccccaggaccacggcaccaacctgacctgtcaggtgaagttcgctggagctggtgtgactacggagagaaccatccagctcaacgtcacctatgttcc

SEQ ID NO: 5563 - DNA, 201 bp, Homo sapiens
tggagctggtgtgactacggagagaaccatccagctcaacgtcacctggaaacaagagaccagagcaggagtggttcatggggccattggaggagctggtrttacagccctgctcgctctttgtctctgcctcatcttcttcatagtgaagacccacaggaggaaagcagccaggacagcagtgggcaggaatgacaccca

SEQ ID NO: 5564 - DNA, 201 bp, Homo sapiens; identical to SEQ ID NO: 5558

SEQ ID NO: 5565 - DNA, 201 bp, Homo sapiens; identical to SEQ ID NO: 5560

SEQ ID NO: 5566 - DNA, 201 bp, Homo sapiens; identical to SEQ ID NO: 5559

SEQ ID NO: 5567 - DNA, 201 bp, Homo sapiens; identical to SEQ ID NO: 5561

SEQ ID NO: 5568 - DNA, 201 bp, Homo sapiens; identical to SEQ ID NO: 5544

SEQ ID NO: 5569 - DNA, 201 bp, Homo sapiens; identical to SEQ ID NO: 5545

SEQ ID NO: 5570 - DNA, 201 bp, Homo sapiens; identical to SEQ ID NO: 5546

SEQ ID NO: 5571 - DNA, 201 bp, Homo sapiens; identical to SEQ ID NO: 5547

SEQ ID NO: 5572 - DNA, 201 bp, Homo sapiens; identical to SEQ ID NO: 5549

SEQ ID NO: 5573 - DNA, 201 bp, Homo sapiens
ctgtgagcagggaacacccccgatcttctcctggttgtcagctgcccccacctccctgggccccaggactactcactcctcggtgctcataatcaccccayggccccaggaccacggcaccaacctgacctgtcaggtgaagttcgctggagctggtgtgactacggagagaaccatccagctcaacgtcacctggaaaca

SEQ ID NO: 5574 - DNA, 176 bp, Homo sapiens
tagtccttcccctccactcccttcctcttttctgctcacacaggaagccctggaagctgcttcctcagacatgccrctgctgctactgctgcccctgctgtgggcagacttgacccacaggcccaaaatcctcatccctggcactctagaacccggccactccaaaaacctgacct

SEQ ID NO: 5575 - DNA, 201 bp, Homo sapiens; identical to SEQ ID NO: 5557

SEQ ID NO: 5576 - DNA, 201 bp, Homo sapiens; identical to SEQ ID NO: 5558

SEQ ID NO: 5577 - DNA, 201 bp, Homo sapiens; identical to SEQ ID NO: 5560

SEQ ID NO: 5578 - DNA, 201 bp, Homo sapiens; identical to SEQ ID NO: 5559

SEQ ID NO: 5579 - DNA, 201 bp, Homo sapiens; identical to SEQ ID NO: 5543

SEQ ID NO: 5580 - DNA, 201 bp, Homo sapiens; identical to SEQ ID NO: 5561

SEQ ID NO: 5581 - DNA, 201 bp, Homo sapiens; identical to SEQ ID NO: 5544

SEQ ID NO: 5582 - DNA, 201 bp, Homo sapiens; identical to SEQ ID NO: 5545

SEQ ID NO: 5583 - DNA, 201 bp, Homo sapiens; identical to SEQ ID NO: 5547

SEQ ID NO: 5584 - DNA, 201 bp, Homo sapiens; identical to SEQ ID NO: 5546

SEQ ID NO: 5585 - DNA, 201 bp, Homo sapiens; identical to SEQ ID NO: 5549

SEQ ID NO: 5586 - DNA, 201 bp, Homo sapiens; identical to SEQ ID NO: 5548
  misc_feature (1)...(201): n = A,T,C or G, or insertion/deletion polymorphism (see Tables 1-2)

SEQ ID NO: 5587 - DNA, 201 bp, Homo sapiens; identical to SEQ ID NO: 5562

SEQ ID NO: 5588 - DNA, 176 bp, Homo sapiens; identical to SEQ ID NO: 5574

SEQ ID NO: 5589 - DNA, 201 bp, Homo sapiens
caacattcccgacattttcacacctgggttggtgtctatgtggggtctgtgtgttgagaacacctgaacacctgctcctcttaaaatgagcccggaggttktgccaggcacagctggagcagtgcagcgcctagatgtggctgtggaaggtgagattaccgcctccagggctcccaggctggctcctaccctgtgggctcc

SEQ ID NO: 5590 - DNA, 201 bp, Homo sapiens
tgtggcttatgagaaggcactgcaggccttacgctgtttccaacattcccgacattttcacacctgggttggtgtctatgtggggtctgtgtgttgagaayacctgaacacctgctcctcttaaaatgagcccggaggttgtgccaggcacagctggagcagtgcagcgcctagatgtggctgtggaaggtgagattaccg

SEQ ID NO: 5591 - DNA, 201 bp, Homo sapiens
atggcccaaagggaagcacacctgcagtaggagggggggcagcggtgggcagggcacagcttccctgcaggttagaccccctcgcaggccagctgcctgcycctgcaggaaccgtgggtctcgggagaggctgccatccctgcacatgacagatcacgcgctgccccatgatcccgtgctacatctcctccccggacgagt

SEQ ID NO: 5592 - DNA, 201 bp, Homo sapiens
tgtatggggagagagaatatggtcccatggagaattttctacaaatgtgcaagtgcaaacgcctgtgtggcttatgagaaggcactgcaggccttacgctktttccaacattcccgacattttcacacctgggttggtgtctatgtggggtctgtgtgttgagaacacctgaacacctgctcctcttaaaatgagcccgga

SEQ ID NO: 5593 - DNA, 201 bp, Homo sapiens
attcctgtgctgtgttttttattacccttggtaggtattagacttgcacttttttaaaaaaaggtttctgcatcctggaatatgaagtctgagaccttccsgtgctgggaacacacaagagttgttgaaagttgacaagcagactgcgcatgtctctgatgctttgtatcattcttgagcaatcgctcggtccgtggacaa

SEQ ID NO: 5594 - DNA, 187 bp, Homo sapiens
cttgaacctgggagatagaggttgcagtgagccaaaacggtgccactgcactccagcctgggcaacagcgcgagactccatctcaayaacaacaacaacaaaaattactcatagaacattttccaggtcaggaaagatgagaagagctggatagacctttccagatgtaagacccccaaagctaaat

SEQ ID NO: 5595 - DNA, 169 bp, Homo sapiens
cttgaacctgggagatagaggttgcagtgagccaaaacggtgccactgcactccagcctgggcaacagmgcgagactccatctcaacaacaacaacaacaaaaattactcatagaacattttccaggtcaggaaagatgagaagagctggatagacctttccagatgta

SEQ ID NO: 5596 - DNA, 201 bp, Homo sapiens
cctgttaagactcctgacccccaagtggcatgcagcccccatgcccaccgggacctggtcagcacagatcttgatgacttccctttctagggcagactggragggtatccaggaatcggcccctgccccacgggcgttttcatgctgtacagtgacctaaagttggtaagatgtcataatggaccagtccatgtgatttca

SEQ ID NO: 5597 - DNA, 201 bp, Homo sapiens
ggatccagtatgagatcaagcagataaagatgttcaaagggcctgagaaggatatagagtttatctacacggccccctcctcggcagtgtgtggggtctcrctggacgttggaggaaagaaggaatatctcattgcaggaaaggccgagggggacggcaagatgcacatcaccctctgtgacttcatcgtgccctgggaca

SEQ ID NO: 5598 - DNA, 201 bp, Homo sapiens
tctcaacaacaacaacaacaaaaattactcatagaacattttccaggtcaggaaagatgagaagagctggatagacctttccagatgtaagacccccaaasctaaatatgccggtgatcagggccaaagcggtcagtgagaaggaagtggactctggaaacgacatttatggcaaccctatcaagaggatccagtatgaga

SEQ ID NO: 5599 - DNA, 201 bp, Homo sapiens
ttgtttttttaatgttttggtttgtttttgacatcagctgtaatcattcctgtgctgtgttttttattacccttggtaggtattagacttgcacttttttwaaaaaaggtttctgcatcctggaatatgaagtctgagaccttccggtgctgggaacacacaagagttgttgaaagttgacaagcagactgcgcatgtctc

SEQ ID NO: 5600 - DNA, 201 bp, Homo sapiens
tgctgccgtaatttaaagctctgttgattttgtttccgtttggatttttgggggaggggagcactgtgtttatgctggaatatgaagtctgagaccttccsgtgctgggaacacacaagagttgttgaaagttgacaagcagactgcgcatgtctctgatgctttgtatcattcttgagcaatcgctcggtccgtggacaa

SEQ ID NO: 5601 - DNA, 201 bp, Homo sapiens
ccgtgctgagcagaaaacaaaacaggttaagaagagccgggtggcagctgacagaggaagccgctcaaataccttcacaataaatagtggcaatatatatrtagtttaagaaggctctccatttggcatcgtttaatttatatgttatgttctaagcacagctctcttctcctattttcatcctgcaagcaactcaaaata

SEQ ID NO: 5602 - DNA, 187 bp, Homo sapiens; identical to SEQ ID NO: 5594

SEQ ID NO: 5603 - DNA, 169 bp, Homo sapiens; identical to SEQ ID NO: 5595

SEQ ID NO: 5604 - DNA, 201 bp, Homo sapiens; identical to SEQ ID NO: 5596

SEQ ID NO: 5605 - DNA, 201 bp, Homo sapiens; identical to SEQ ID NO: 5597

SEQ ID NO: 5606 - DNA, 201 bp, Homo sapiens; identical to SEQ ID NO: 5598

SEQ ID NO: 5607 - DNA, 201 bp, Homo sapiens
ttgtttttttaatgttttggtttgtttttgacatcagctgtaatcattcctgtgctgtgttttttattacccttggtaggtattagacttgcacttttttwaaaaaaggtttctgcatcgtggaagcatttgacccagagtggaacgcgtggcctatgcaggtggattccttcaggtctttcctttggttctttgagcatc

SEQ ID NO: 5608 - DNA, 19054 bp, Homo sapiens
ctttaaccattgagtataatgttagctgtgggttttttacaaatatcttttatcatgttgaggaagttccttcctactcctacttcttggagtgtttttgatataaagggtatttaatttgtcaaatgctttttctgtgtcagttgagattatcatgtgagattttttttccttcattctattagtgttgatgttacattggttgattttttatgttgtactacatttgcattctttatataaatttcacttggtcatggtgtataacccttttaatatgccattggatttagtttgctagtattttgtttagagtttttgcatctatattcataagcaatatcagtccacaggttttttgtggtttatttgtctggctttgctataatggtaatgctgtcttcttagaatgaatgagggagtgttttctcctctttcattttttaaacgtttgagaaggagtgatattaatttttctttaaatgtttggtagaacttaccagtgaagccgtctggttcttaacatttttctgtgttgggaggtttctgattaccaatttgatctctttaatttttacagatcttttcagattttctatttcttcttgagtaactttttagcaatttatgtattttagaaatttgttcatttaatctaggttatttaatttattggtgtgcattttttcatagtattatcttataatcttttaatttttgtaaagttgataatgtccccaccttacctgatcttagttatttgtgtcttctctgtattctttttgtcttcttcttctgtcttagcatagctaaaggtttgtcaactttgttgatcttttaaagagtcaacttttgctttcagcatgcattactttttaaatagaaatatatacacctaagttgcattacaaaggagttgtcctccacacacttattctttcccaccatcagaggtttatggtccccgcaaaagtcaccatcagttgggctcaactccaatcagtcatggtaggtcagggtccatctcattgtctccatcactcatgcccacccagggtaagwctaatcatgttcaccaatcagaacctctgccacatcagctctgtgggtttcctctcatgccatctgtaccaacaatgagcacagtctgggtttcctgatgttttctatagcatggtgcccctccctgggacacctcagaagccacaatgatattcattaaacttcttcctgcaagtactccctctattgctccttctactcaccaagcttagtgtcagggaatatgctggtggggagtatgaatcttagcttctcactcccagactcggctcccaacctgctgttgccaagtcttggggacatctataaatgccttctaaatacctgtcttggcctatccccagccacagattcctccctagagcaggctacctctgaggcatctatactgagatcttaatcacagagacatttaaaacatctaggctacaaaagaattcctactatagggttcaaatgaatttctttccgtcacttgagacagctttttagcaagtacatgtattaaagattctgatttccccttttttctcctacagtttgtttggcctaaaggtatgacatctaatctgctgcatttacactctaagtcaaaattaccattttgttcttttaatttctatttctaatcatacattcttgtctattcctggttcatctggagacaaagttgaacttagaagatggaggagaaattcttatctgccctctgctagttgacacttcctttccaagaatcatttgcagttgctgggctttcttgctgtgactctatgccctgttgtgttactttttcatttgtgacaaaaacagtggtaatagtttgcttcatttttattatgaagacttgaccaggataggtaggaacataattactgctttttctgtgggcatcatattggtccagatcatgtttaaccagaattgaagatgtaaaatcctagaactcactaatctattttagtrggtcacaggaagcatgcaaaccataaaaaccgcaatgaaccaaaagcatctgtgttgacaagaggcaagaatttctctattttctaaaggcactaactgaacaaatctattgcccattacttaggaaattgctaagggcatcgttaaagtacttcaggctgttgaaaaaccttttctgtcttcttgccccaccaccaattctctctagctatgctttctctcacatgttcttgccatccatggagtggcagagaggttctgagtacaactctaactttcagtttcaatggcctaatccccaactcaactgctgaccttgagtgtaaaaataaacaagatcttaaacatcttagggccagcattctgggtcttcttttgttatttggggagcataaactattctcatatcattggcttgcagaaaaattgagcttctcctcttccttgccccatgtcaccttgaggtgaccacagccctgccttctatgtaatcctgcttggtcagcaggcacatcagagctcagtggcttgtgacatactttccttcaagcctgctcgaagggccatactcatcattgagactgggaaccttagaaaccatgaacccagtgccaatgggtagatacagaattctcaaactcatgaaaaaacatcctttttaactctctccgtgtgcataaagaattctaagatgtactgatcaagattcccaattttctaactatctattaatatatggacgaggtaagaagaaagttgcaagaaaaaaatttgtttgacttgacggttgtgtggttatttgccacactcccccagatccactctgagtcccaggatgctgattttaggggctacattgcctagactgtccattrttccctcttcccatctggttcagtcactgggaagcactggtaggaggtcagagtgggagaaggaggttaggatactttctgcccctgctgtcctactgctttgctgaacttctagcagtggctgagccatcaacctgcagctctcaattccagctgtctgtagcactcaagtggtattgtttattcttttgatccttctagctgttaaggaagaaaaaaataattttttcctcaatgctcataagttcttggaatggacccctgtaacaaaagacagattaacacgagaaaagtttattaacgtacatattttatacgtacataggagctatccagggaatgaataattcttaaaaaggtgactttgaattccagctcatatagcatcttcaacaaagttcagtaacattttagagatatgacaagacaaagaaaatgaactttgagcctctagggacagtgacttgtaggaaggcaaaaggaataaatggaggtaaaggctggttagtaatacttgttaatgaagattcctctggtgccatctccaggtccacaaggatttaaatttgtcttcagtggtgaacctttgttcaccctggcagaaggtgtggaggggggtgcagatccgttttgtctttgtaagtctatatcctgcttttagacaaataaagggagggaaaagagctttccttcatctgcttcttaattgccttcagctcaacaatccttatgcaaaagaggtacattttagggtgtcaaattctggtctcccacaaagcatagggatgacagaccacctcaccatccctgttgcttcttttaagcctgctcacccctccaaaaatattttcattctatactgtctcttcaaaatctcagcggagggtgccctctgttatcctgccctctgtgtcagtataagccaaaggtttgaatcctggctctgcaactatctacctctgtgcctctccttgtttatgaaattacagggctggagacaaagatcacaatgtgaagacaaaattggagagcggtcctaatcagccagagcaaaatttctggctcttgctcttccccatcctgggttgaatcataggaacaggtggcaagatgccagggtcaggagattccagaagtggcagcaagctcagtgttaccaggtcagggatgacctgtcttattattgaaatctcagagatatgctccaattccggcccagagacacattgagagacaactggggaacttgctatgttcctgaacaggcaatgagctgtcttccaagaaaaaacctgagacccttcaagtctcaggtcttacttagcacatataccaggtcttacacaggacacatggttacaactgactgaaatctgggctgggtgtaggagctcacacctgtaatcccagcccttcaggaggctgaggcaggcagattgcctgagcccaggagttcgagaccagcccgggcaacatgacaaaaccccatctctacaaaaaatagtcaggcatggtggcatgcacctgtagtctcagctacttgggaggctgagatgagaggattgcttgaggttgagactgcagtgaagcatgatcatgccaccgcactccagcctaggcaacagagcaagatcttgtcgcaaaagaaagcaaaaacacaacataacacaacaacaacaacaacaacaacagcaaaaaagccaacttcttgaaatctggaaaggacacctggactgccctgagcatttgattgttgttggctctagcagtggatgcatccttcaacctctggcactctgcagggctcagactgttctgttctgtttgttacctgtggagtgcctgccagaccctgctctagctgctttaggtccatttaccctcatagacccccagtcttgttattcatatttcatatttgggaaatggaaacttagaaacttgccaagtccacagcatgagatcctgcctccggtgtctgctggattccagaaagtgccaggggccaacttagatgacaccatgttctctgcacaatcttaggaatgctcctagtctgatgtccccattgcaaaatttacattatcttttaacaaaacgtctttccaaggaggggcatttaaaataactgaggttcttcttgctaaggacgttcctgacacaagagataatttagcatttccttttcattaaaaagtttgaaatcctgtaatttgtgataatgtggatgaacctagaggatgttaagtgaaataagccacacacagatagacaaataccacgtgatctcactcttatgtggaatttttttttaaataagttgcttagccgggcatgatggcacacacctgtaatcctagctactcaggaggctgaggtgggaggatggcttgaactcagaaggtggaggttgcagtgagctgagactgtgccagtgcactccggtctgggtgacagaatgaaacccaatttaaaaaaaaaaaaaaagttgctatcttagaaaaagacagtagagcagtggttaccagagactggggaggaaagagaggaggtgagaatgggcagcagttgatcaacgggtacaaagttaccatgagataggagaaacaagtgctggtgctctgctccaagtagggtgacggtagttaataatgaattctgtatatataaatagctagaagagagggttttcaatatcattattatttcaaaagaaatgataaatgtttcagaggatggatatgtaattaccctgatttgatcattgcacaatgtatacatgtagcaaaacatcacattgtgtcccataaatatatacaattattatgtgaattaaataaaaaaaaattttaaagtcttatctaaatgaaatttctaaccagattctgaatccatgataccactgaaaccagcacacatgatcgcagtaaaacctcattatacttcctccactatcaccaataccctttattctctggaacatgaaacattctgttgtgctcatatcatgcaaattatcactagtaggagagcagagagtggaaatgttccaggtataaagacccacaagataaagaagctcagagtcgttagaaacaggagcagatgtacagggtttgcctgactcacactcaaggttgcataagcaagatttcaaaattaatcctattctggagacctcaacccaatgtacaatgttcctgactggaaaagaagaactatatttttctgattttttttttcaaatctttaccattagttgccctgtatctccgccttcactttctgcaggaaactttatttcctacttctgcatrccaagtttctacctctagatctgtttggtycagttgctgagaagcctgacataccaggactgcctgagacaagccacaagctggtgagttgtaggcattttttccattactttctgattcataggctcaacgcacctcaaagctggaaatgccgggtctgggtacaccctggggaactgcaaagcctgcacacttgggggraatgatcaagatgagaggcaggggtggggatggcatgtgcaccaggagatgttagagaaaccctgaggaagagcagcgtgcagcaggtgatgggggagagtgggcagcaagcgaggccaggacagccactctgctcagtcaccwgtccacacacccaggggctcactctgcccctctgagcacccaaggacgttaaagagctggaactgttagtctaaatataggaccatccaagctctgaaccaaaatgtgtcccttgcctcaactcaggagatccacagaggcagaagtaaggaatttattttctgaaagatagatttctatcagttctgggtgacatgttctgacacttgaaatgacacctaggacagcacatttcaggcatcttgctcattgttcactgtagtagaagctacatgctagccagttgtaaaaatgaaattaagtaatgtgtgcacagcatttaacatagcatctgagcttcaggagcactcaattaatgaccacagttgtgattctttaggcagatgcatttttttccaactttgatcagaggtcttatttagcttctccagatttcaagaatctggctcagtgatatgaaatacaagacttgtgaaaagtgtcaattgcaagagaaatggaaggataaagtatacaggtgggtggaaaagaaattcacagtcactgccagaaaaaaaattcttgagaatcaagtcctgatgatgttagggcttatagttcttattataaagagttttatgtactcattcagtgaacatttattggtgcctcctttagccaggtactatcataagagctgaaaataraagcataatccagtccttgatcttgaggaacatgctgtgtgtagcagataacataataagtgcttatctagatgcatgcagtgttatgtgataagagtaatatgacagaggatacagattaggcttcacagagaagggggatttgagcaggaggtattgaagggtgaatagaagctcaccaatcattttgggcagaggggcaaggacctgcaaaaccactgaagcatgaaggaaatggtgagtttagggaaaatgaagagaagatggctgtgactgaagcacaggatttgggattggagaagggactggaggtgaggctgaraagaggcaaactcagaaaagatgttgtgctgggcagtctggacattatctttgaagcccaccacatataagtcatagggctactggaggttttaagctaaragtgactattcaatttcaacttaagagaagataggttgagagggaacatggcttgagatgagccatgagcaaaggaaagactacaacaaagccaggagtgaggagtgtgtgaagcaagaaagtgacagttgaaagcagtgcagaggggatgaatctgagaggcatctatgaggtggaactcaaatgacatgataataatacagggcatttctctgtgtcagatgctgtcctaagtccttactccattgatcttcacagcaactcagcatagttaatattttatgcataaagaaatcggcacttgaaggagtaattggccccagattacactgcctataaggattcaaatccaggtttgtttggctccaaaaactggctcctaattttcagaaggagaagcracccagggcaatgcccaattttgcttcttaggcaatggaggaatccacaatcggaaggagttttcagcagtgccccatttggggtgggttgaatttgaggtccctgcatgatacccactttgctcacttcagtgcctaaaactgagtatggttcatagtaggtgttcaataagtgttgatgcagtgaatacatgcatggggagatatgcatcaggcaatgggaaattcaactctaaggcttaggggaaagctggagcttgaagacagagctttagaaaacagtagcatagaagggagtaggaaccatgagtttagacaatacaattcaggaagaactttgtagcaaggataaagaggcaaaaaattaaagaggtgagagctaagtgtggtgcctggggaatcttaaggtgtgggcacggggaggagatgccagcaaagaacatgaataaaaagcggtagcacagcccctcccatctggaagccaaaaagaattgtaaatggaggaagttagcagaaggatcaaatacttgaagagggtggaattggaataaaaccagggcatttgaaaaattgggttgtcactgcaatcttaacaagagaagttttggcaggatgatggaggcagaaagctgagagaatcatcagttagaacgtttttgacttcagagaacagaaaatgcagttcataatggctttaaaacaggggcttgtttttctcccagcaatttgagaggccaaggcgggtgcatcaggaggtcaagagaccgagaccatcctggccaacatggtgaatccccatctctactaaaaatacaaaaattagcggggcatggtggtgcacgcctatagtcccatctactcaggaggctgaggcaggagaatcacttgaacccaggaggtggaggttgcagtgagctgagatcrtggccactgcactatagcctggagacacagcgagactccgtctccaaaaaaaaaaaaaaagaaggcagaaggtgaatagttcaagggtgggtttaggactcagtgataataggattctgcctggcttctcatggttctctaggtcttccattcatggcaccatgccctcactaggcatgctgccagagcaggaggggcaggtggagggttctcttgtgtctgtcttatcagggaagaagagctttctcagaagcccccagcagactcccttttcatattatggtccagcaatgagtcacagacctatgcaccacctgcaaaggagccagagaaaacaaacgcccagcgcttttagcctgaaaatgagaatctggtttgctggggaagataaagggtgtcggaaaatggctgttgggtaaatcattgatgtctgccactaggaatgaaaggcaaatcaggaactggcacacatgctttcagggagatggctgcaagggagagggcaaagactgggaagttgcttatgtggtgccagactatttggargatcatggattgcggtgtttgtgttgtgtggtcatcattttgttctttgtttacagaacagagaaagtggattgaacaaggacgcatttccccagtacatccacaacatgctgtccacatctcgttctcggtttatcagaaataccaacragagcggtgaagaagtcaccaccttttttgattatgattacggtgctccctgtcataaatttgacgtgaagcaaattggggcccaactcctgcctccgctctactcgctggtgttcatctttggttttgtgggcaacatgctggtcrtcctcatcttaataaactgcaaaaagctgaagtgcttgactgacatttacctgctcaacctggccatctctgatctgctttttcttattactctcccattgtgggctcactctgctgcaaatgagtgggtctttgggaatgcaatgtgcaaattattcacagggctgtatcacatcggttattttggcggaatcttcttcatcatcctcctgacaatcgatagatacctggctattgtccatgctgtgtttgctttaaaagccaggacggtcacctttggggtggtgacaagtgtgatcacctggttggtggctgtgtttgcttctgtcccaggaatcatctttactaaatgccagaaagaagattctgtttatgtctgtggcccttattttccacgaggatggaataatttccacacaataatgaggaacattttggggctggtcctgccgctgctcatcatggtcatctgctactcgggaatcctgaaaaccctgcttcggtgtcgaaacgagaagaagaggcatagggcagtgagagtcatcttcaccatcatgattgtttactttctcttctggactccctataayattgtcattctcctgaacaccttccaggaattcttcggcctgagtaactgtgaaagcaccagtcaactggaccaagccacgcaggtgacagagactcttgggatgactcactgctgcatcaatcccatcatctatgccttcgttggggagaagttcagaaggtatctctcggtgttcttccgaaagcacatcaccaagcgcttctgcaaacaatgtccagttttctacagggagacagtggatggagtgacttcaacaaacacrccttccactggggagcaggaagtctcggctggtttataaaacgaggagyagtttgattgttgtttataaagggagataacaatctgtatataacaacaaacttcaagggtttgttgaacaatagaaacctgtaaagcaggtgcccaggaacctcagggctgtgtgtactaatacagactatgtcacccaatgcatatccaacatgtgctcagggaataatccagaaaaactgtgggtagagactttgactctccagaaagctcatctcagctcctgaaaaatgcctcattaccttgtgctaatcctctttttctagtcttcataatttcttcactcaatctctgattctgtcaatgtcttgaaatcaagggccagctggaggtgaagaagagaatgtgacaggcacagatgaatgggagtgagggatagtggggtcagggctgagaggagaaggagggagacatgagcatggctgagcctggacaaagacaaaggtgagcaaagggctcacgcattcagccaggagatgatactggtccttagccccatctgccacgtgtatttaaccttgaagggttcaccaggtcagggagagtttgggaactgcaataacctgggagttttggtggagtccgatgattctcttttgcataagtgcatgacatatttttgctttattacagtttatctatggcacccatgcaccttacatttgaaatctatgaaatatcatgctccattgttcagatgcttcttaggccacatccccctgtctaaaaattcagaaaatttttgtttataaaagatgcattatctatgatatgctaatatatgtatatgcaatatatataggctcttgcttgatctctccaggaggtagtgattatgagaagggggtggagaatgatgagttccttcaccaggagcaaaggacggggatcgtgtggaaccactgcagaactatttccgraatcaactaagtggagagagccaggaaggctgcatcagaacccagtaaagcttcttgtctggatctgagctggtttgttttgtgcttgcttttccctgccttgccactcccctcactcttctcttttccccacagcctttttcacatagctcttggctgtaggattgccccactccaaaaaccagtgtgtggaggtccaggagtgagaccrggaaagaatgtgaaagtgactacacaaggactcctcgatggtcgtgraaaaggaaagtcaattggcagagcccctgaagccagtcttcaggacaaagaaggagcctagagacagaaatgacagatctctgctttggaaatcacacgtctggcttcacagatgtgtgattcacagtgtgaatcttggtgtctacgttaccaggcaggaaggctgagaggagagagactccagctgggttggaaaacagtattttccaaactaccttccagttcctcatttttgaatacaggcatagagttcagactttttttaaatagtaaaaataaaattaaagctgaaaactgcaacttgtaaatgtggtaaagagttagtttgagttrctatcatgtcaaacgtgaaaatgctgtattagtcacagagataattctagctttgagcttaagaattttgagcaggtggtatgtttgggagactgctgagtcaacccaatagttgttgattggcaggagttggaagtgtgtgatctgtgggcacattagcctatgtgcatgcagcatctaagtaatgatgtcgtttgaatcacagtatacgctccatcgctgtcatctcagctggatctccattctctcaggcttgctgccaaaagccttttgtgttttgttttgtatcattatgaagtcatgcgtttaatcacattcgagtgtttcagtgcttcgcagatgtccttgatgctcatattgttccctattttgccagtgggaactcctaaatcaarttggcttctaatcaaagcttttaaaccctattggtaaagaatggaaggtggagaagctccctgaagtaagcaaagactttcctcttagtcgagccaagttaagaatgttcttatgttgcccagtgtgtttctgatctgatgcaagcaagaaacactgggcttctagaaccaggcaacttgggaactagactcccaagctggactatggctctactttcaggccacatggctaaagaaggtttcagaaagaagtggggacagagcagaactttcaccttcatatatttgtatgatcctaatgaatgcataaaatgttaagttgatggtgatgaaatgtaaatactgtttttaacaactatgatttggaaaataaatcaatgctataactatgttgataaaagatttaaaaacaactggctgtttttttacactgtggtgtggaagattgtgttgtgttcacaacttttcacttcttcccctgtgtgattacacacacctgcccttgtggtgtgacttgcagtgcgccctacaggccacacaaccccatgccctccaccactggctctgctgctggaatgtgagcagaagtgacatctgcctcatccaagcagagcctcttgctcagccacaggaaggcccattccagatcacacccgtcagcccgtgcgccctggtgaatgagaagacacagggagctgcagccacatataacatgagcaagaagtctgtgtttgctgtgataagccactgagttttaggggttgtttgttaagaagcacaaaaaccgattaagacatgtggtatatagtgacttcatatatagaatctggaaaactatccatttattttcaatcatggaattcaatatgacaagcatcccggagggtctacctatgccagactgggttggaaacagaaagacagatgttaatgccagtgtcctttacacctccaagtccagggccagctgtggagtgggaggggtagagaaggtcctgtgcacagtcacagtgcgctgtgcagagcaggaacagaggcatctgtgaaaagtgctgagagcctggaggacagagtgactaatgcaatgacagtcttgcatcataggaataacagccacagcaggattttattgctgccaaagaaactgccatttaaaaattgccagccatccgggaggctgaggcaggagaatggcatgaatccaggaggcggagcttgcagtgagccgagatcgggccactgcactccagcctgggcaacagagccagactccatctcaaaaaaaaaaaaaaatgccagccatctctctttctaaagtggaatcctcaagtctcgtttattctggggacatttgagtaggctgttcgagttaagcaggtggaagatgatgatccctcatcatcattctgagggatgagtgtctgaagactttttggtaaggaagggtcttggcatagcccaccccatgccacctcccttgatctgtgatatccccagcagctggggaggttggagcattttgcaaagaggccccgaagcctccagaaagtaaaccttcaagagcccatccttccttcctcttttgtttttgctcattatgaaaacttccctgacaaattgaaaaggcttcaggtgagattagcccacaggaaaaaccaccaagggccacccagaggggccacactgtgacagaaggagtatgggctggtgagctgacctctggaagacagtgcatgaattgaggagaagagattggttccaggcatgggaggaatgaggctggaaatttcttcagacattgccacttcggcactctgtgtgtgtgtgtgtgtgtgtgtgtgtgtgtgtgtgtgtgtgtgtgtgtgtaaacagagtcctgtaatgcaaggtccggccttggcagccccagcctggagccacagtgagatgtgagccgagggttatgctgggaaaaacctctccctcccagcacctgaaaggctctgcaggcccagcagctcagcaagcaagggtaagggcatggactaacatcttatttcatactatcccttataacacatcctaatgtaatcagctcacaatatgaaattatttcatttctctccagtcattgtttcaatggggccttagggttgactggattctggagggccctgcctagaggagggggtgcattctgtccctatgtcccctcctgctccatcctccrcagcacgtgcctagtggtctaccttgtggggaattcttgtacctccctcttctaggcatggactagcattgagaagtgggagaggagtgttaggaaaaagggcaaatatagacataccttgtcttattgtgctttacagatattgtttttgttgttgttgttgttgtttacaaattgaaggtttgtggcaaccctgcctcgagcaagtctattggtgctgtttttccaacagcatgtgcttgttttacatctctgtgtcacattttggtaattctcccaatatttcaaactttgtcattatttctatatctgttatggtaatctgtgatcagtgatctttgatgtcactattgtagttgttttggggcaccatgaagtgcacccatgtaagatggcaaacaatcaataaatgttgtgtgtgttctgactgctccatggactgcctgttcctgagacacaataatgtatatataacaattatatatatatatatttataacaattatatatatatatattttttttttttttttgaggcagagtcgcactctgattgcccaggctggagtgcaatgatgtgatttcagctcactgcaacctctgcctccccaggctcaggtgattctcccacttcagcctcccaagctgggactacaggtgtgcaccatcacacccggctaattttttttttgtatttttaggagagacagggttttgccatgttgcccaggctggccttaaactcctagactcaaacaatccacctgcctcagcttcccaaagggctgggattacaggcatgagccactgtgcccagcccaagacacaataatattgaaattaagccaattaataaccctacaatggcctctaagtgttcaagtgaagggaaaagtcccacgtctctcactttaaatcaaaatctagaaatgattaagcttagtaaggaggacatattgaaagtcaaggccaaaagctcacctctgcaccagttagccaaattgcgacttcacaggaaaagttcttgaaggatatttaagctctactccagggaacatgcaaatgaagagaaaacaaagcagccatattgctaatatggagaaagtttgagtggtctggagaaaagatccaaccagccacaacatttccttaagtcaaagcctaatccagagcaagactctaactctcttcaatgctatgaaggcggagagaggtgaggaagctgcagaagaaaagtttgaagctagcggaggttggtttgtgaggtttaatgaaagacaacatctccataacataaaaatgcaagatgaagcagcaagtgcaaagggagaagctgtggcaagttatccagaaaatctagataagataattgatgaaagtgtctacacgaaacaacagattttcagtgtagacaaaacagtcttatgttggaagaagatgccatccaggactttcacagctagagaggagatgtcaaggcaagctgcaaagctccacaggacaggctgactctctttttagaggtgaatgcagctgatgactttaagttgaagtaaatgttcatttactattttgtaaatcctggtgtcattaagaattatgcgaaatctactctatctgtgctccataaatggaacaataaagcctggatgacaacacatctgtttacagcatggtttactgaatatttcaagcccactattgagaactattgctcagaaaaaaagattcctttcaaaatattactgctctgcaccatgtcgatcaagagctgtgttggagatgtacgagaatattcatgttgttttcatccctgctaacacaaacatccattctgcagtccatggaccaagactttcaagtcttattaagaaatatatttcataaggctattaagaaatagctatatatatatatatatatagccttatatagtttatatagctaccattgatagtgattccattgatggatctgagcaaagcaaattgaaaagcttctggaaagtagtcattattctagatgccattaggaacatttgtaattcatgggaggaggtcaaaataccaacattaacaggagtgtgaaagacattgattccaacccccatagatgactttcaggggttcacgtcttcagtggaggaagtcgctgtagatgtggtggaaacagcaagagaactagaactagaagtggagcctgaagttgtgactgaattgccgcactctcatgatcaaacttgaacagatgaagagttgcttcttacatatgagcagtgaaagtggtctcttgagatggaatctcctcctggtgaagatgctgtgaacacggttaaaatgacaacaatcgatttagaatattacataaatttagttaataaagcagtggcagggtttgagaggattgactccaattttgaaagaagtgggtaaaatgctatcaaatagcatcacatggtatggagaaatcttttgtgaagggaagagtcgaccaaggtggcaaattgcattgtcatcttattttaagaaattgccacagccacccccagctttagcaaccaccaccctgatcagtaagcagccatcaacatcaaaacaagaccgccatcctcttcagcaaaaacactatgacttgctgaaggctcagatgatggttagcatttttagcaatacaatatttttaattaaggtatgcacattggtttttctgacataatactattgcatacttaatagactacagtataggataaacacaacttttatatgcactgggaaaccaaaaaggttatttttgagatatttgctttactgtggtggtctgaagctgaactcacaatctcaccaaggtgtgcctgaacctctttagctaactggccactgccacagtccactctgtgttggtcaagatgccccagagtggcaggcacactgtgtggtcacatccaagggcctagatatggtgggggctccaaatggatctagatatgtgagatctctctttgatttgacttcttccaacccaccattttctgggtgctgggctcatctcacccagaaagtaggacccaatgtgacagttcctgcccagttccctcctgtggtagccacttgacccaggggcactcttgatccttgcagcctcacttacacaccctatctctacccctattaactctctccaatccccactccccctgctcagcttgtctgctgcccagtgggggccccacccatgctggcctctccttttgcaagtccccattcctcatatggtttcttcagagcccctttctttggctttgaggagagatgccctcactcgcttccccaccaatcctgcccacttctacaatccattcattatcctaattgcctccgtatacagactggagtgagaggagttgatgtgatgggtgtggatacagggctggtgctgtcatcttctagtaagccctgggagaggtgtctgagcccaggtgtcagtggttttctttggaactgtgagtgcataacacttctttgccttcagccttaggccatagttgctagttctgggacaaccagaaaagccctacataatctcgtgttatgtgcagagctgagtatagagctccaggtatgatctgactcacttaagatcacagtgagtctattgtattgttgaactgttagcttagacatctgttactgtacctacatggcactagcctcacgcctagacaccgatctgaaagaaatcccctaaatgcatagagaagacttctcagctgagctaaggggctcccaccaggtttgagcctatctaatgaatccatgaggtagacagcctgcacatgtccacttggtttgatgaattgcacaaatccctatgggggatgtggttcatgggctgggaagtgggttaccctgggaaaggtctacaggacagaggcagggatggagacaacagcatggtgagttcccaacccacccacgatgataggtgtctgaggcagaaggtaaagaggctgtcacctggtgggtgtcataagactcaagtgtcattgttgaggcacatgggtaacaaagcgtggcactggatgggggtagattcttcctatttctgtgaggatcagggggactccctggctctcctgctaaaggtggctctagggacaggaagagtgtacttcttgacagggatgtcagagc

SEQ ID NO: 5609 - DNA, 105314 bp, Homo sapiens
cagtttgctgatatcacaggagatctgctatttgatcattttgcctgccaacttggatgtctgtctcagcaggaaaccatttaaagaaaataaatgaattctcagcacttgacattttctggaggacctgagtcctttccaagtgagctcatatcaagcacagttggtaagacagagacgggaaaatgtgctttctccctgttaagaggacagcctcgctgaagcatcttgggcagggcagtattaagtgacttttccttgttgatgaggggtcctctcacctttgggagagaggtggccctccaccctggaggggctgcaggaagtggaagcaggttccatagctggggggtgttacaagtgagctgaaggagaagtagcatggaattcctcctcattttctctcccgagtccaccctgcctcctccttcccaacagcttgtttattacagcatggtgacttggggcaacgtgattatatgagatggtttttttctcccttctctgtcctccctcctgggcacagtgtatatagtatgagagctactgtaatgaaaggtgcacaggcctttttaggaaagtgattgcaggtgaggccaactcagccaggaaaatctcctgttgcttcctaggatgggtcaggggaaaaggagagggactttaaaacatggatacttcagacctggctgcacactggactcaccaaggggattaaagaaaaacaatgcttgggcctcacctccagagattcagatttaattgatctagggagtggctggggtatcaggatttttaaatctccccaggtgatgctaacatgcagccagatgtaaagatggtaggtttagagggagagaatgcaatggttttcactgttgtactgcagggtgatgatatggggcagggcaggagcctattccagcccctacacctgtggacacttgcgttagaggtgtccacacttctaccttgaagctgcagcactggaatacttcctccacactgctggtgctctggagcctttgactagccagggggccgctgagtaacaaaccttcccactgtctccttccaccatggaccaggggcagccatcacacttcctcatgttttttagtgacattacttatcatttaccttaaagtaaatgataaataaaggtggacctaggggtctctcttgtttttcctttctttctttctttctttctttctttctttctttctttctttctttctttctttctttctttctttctttcttctttctttcttatttttctttcttttctttcttttccttctttccttctttcttttgatggagtctcactctgtcgcccaggctggagtgcagtggcacaatcttggctcactgtaagctccacctcccgggttcatgccattctcctgcctcagcctcccgagtagctgggactacaggcgcccgccaccatgccaggctaattttttgtatttttagtagagatggggtttcaccgtgttagccaggatggtctcgatctcctgacctcgtgattcacccgcctcagcctcccagagtgctgggattacaaattcctttcttttttaagagacagggtcttgctatcactctcttccaggctggagtgcagtggcgagatcatagctcactgcatgctcaaacccctggcctcaagcaatcctcccgcctaggcctcccaaatagctgggactgcaggtgcacaccaccatgcccagcttcctcttattttcataaaagaataatttgtgtgtgcacatctttctttggaatcttggattgatcaaaggaggtatagttattacatgtgtcctacatgctgaagttgaaagacaaaactagagaagaaaaatgcctagtttctgtgggagtgattataacaaaatagctaatatttttgagatactatttatgaagtaatcaattaagccattacaataattctgtgagctaagtaccaatagtatccccatttggctcaccgtaataatacgtaattggctcaatgaaataataatgcgtccagggatctgagatacacacttgagaaaattagtggtgagtcaacataattgccaaattatatgatattattataaagcaaagctttgggtgtaatattaaggcctatgtctctttctgtaaatggttaaactgaggcaccgagcagcctgcttaatcgaaatcagagcacaaaagaggggaggaggtacaatcctctaaaacacatactgtcatcaacctcttcatcttgaaatattcaattaaatgttatccaaacccaaagttactaatgaatttggaaatgagctggctgtgactgtgagtatggaaattggtggagaggagaaactccagagactggggaggagccacaggctgcctggcttcagagttgttaggtagaagagaaagcagacctggaaagaaagatacagggagggaaagaaggaaaagggagataaaaattacagaaccattgaaggaaactgctccacagtttcccctctgcctttgggcaggagaatgtctcaagagcgttcccaagcttcatgtgcacaggaatcagtggggtcctgtgaaagacgacttccattcagcaggtctggggcagggcctggcactctgcatttccaacgctctctcctaagtgatgcctatgctgctgctggcccatggacctccctgtgagcagatgggtccactgggatcctctggggagagggtgattgaaaccccctggaatccttctcccatacctctgacactcagacccatggtctcccacccccgtcattgctacagtggccccggtaactggccagttttgtacttattggagtctgggggagtgtcatgggaaccacgggacaacatgagcaagggagagtgagcaaactggcagctggaaggcaggcaggctaagttacccaaatgacagaaggaagagaaggacaagaaggcagagtctgctcactcactcaagtcaaggtgattaatctctctatgcctcagtttccaccctgcaaaatggggatactattggtacttagctcacagaattattgtaatggcttaattgattacttgataaatagtatctcaaaaatattagctattttgttataatcactcccacagctagatgtcagcccttgcatgaaatcaagcattcggcaaacatctatgcagcgtggactctgctgggccccagctgggtccctgagcagagggtctggattggccatacctcatttatattgagatgaatgaactccttgttctttgtactgagagcctggaacacccctgataggaragaagggggaaaggcatccttttaaagacaattcctttaccaagtttgtttcccagcgaccaaagggccttccagtggagcctgtggggaagctgctccatctggtggtaaacaaggactttcatcaagggcggcgatgggactctcatcaagggcgggctgaaggtgaacttctctgaacggatggaggcatccagtcctgtagcaagccagtggtcacctaagccagtcagccggccagcagctcctggagccaaagcaacgcccctatcttaaccttctggggggtacagggcccttgaaatccataggccccagaaaaaaagcacacgcacgtaaagttttgcatgaatctgaaagttgttagtctcgcccttgtaggaaggtgccgtgggtgctgtcagaggacagagtggcacaggagagcgtgccagcactgagctgggggctgggtctaccgcatggtgtagtgacctgagtgcacctgagcaagtcactgccctcttggggcctcagcctcctcaccttcagaagacgaggtcgagccaatcagccctggcttcacttgagaatctctcgggtagctttaataatacaacccaaagcggggtgggggaccatcactggacacaagaaatggaagagacccaacaaccaaacatggtgactgggtcttgtgtggatcctgagtcaaccaagcaactgtaaaaaggtggcctggaagacttgggcatgaaccgggcactagagaatgttgagggtttgctgagaatttcgttaggtgtgcaaatggtatgaagatgatgctaaaaacaagtctatcagctggagatactcagatgaatggacagagtttctgagatctgctattaaattatttagggggaaaatgtatgtgttgcgggagcacaagggaaaagttagcaagatggtaattgttgaggttgggtgtaaaggtctggaaacacctggcgaatttgcgtaactcccaatgctgtgtgccacccctgagattctaacagaattggtcaactgtgcagcctggtcatcagcatttctttaggcacccctggagattgtaatgtacagcgaagtttgagaagtgctgatgtggagtgcatgggaacctattatgattctttatatctaactggagggttgacattcttacaataaaaagttaaaataatactgcagcaaagctccatccttggtaattctaaaagttctccaggcaaatctaatgtgaggatgccagagtggatggtgttaagcctaaagggtcttcaccctaatattcctctactataagaaaagctgaggcactcccaccccccgttctgggaaggattacacctgggtggtttagaaagggaaagagcaatggagagaagagaaactagcaaatctcattatttctagggtcagctctgaccaccctgtaagtctaataacagattctgtttcaggaggggtctttctagaatgcacctctcactagctaccagtaaccccttagggaaagccggcttcctggcttgatatactagaccctttggggcctgctggtctgtctctgattttctctcatcattccttaatcaacacatactcattgattgtccagaaattacggctctcctggagcttagagtctagaggggctgtgcttcaggcaagtaattagtgttctattaccaaagaagcagagggagctatcatgctgataaccaagggtcacagccctcacctttttattttaatttaatttaattttattatttatttatttatttatttatttatttatttatttatttatatttttgagatggagtctcccactgttgcccaggctggagtgcagtggcaaatctcagctcactgcaacctccacctcccaggttcaaggggttctcctgcctcagcctcccgagtagctgggattacaggtgcataccaccacatttgactaattttttgtatttttagtagagacaaagtttcgctatgagctggtctcgagctcctgacctcacgatccaactgcctcaacctcccaaagtgctgggattacaggcgtgagccactgtgcccagccccctgccttttttttttttttaatcaagtattcatacctcgaagtggcctatggaacacagattagaaaataccaagcaggacaaaatggaaatgcggggccccctgctcctaagttgtgaagactttcaagatggaaacgccagaacattaaaccaagcacgaggcacccttgagggcacgggtcctttggcacctgcacacagggcatgtcctcatagccactccagtactgagttacaggccctggacatgcttcactcagcctcaccttcaaaaccacctttgaggggcaggatggctatgacaataaactgcaaacactgaagcgcacgggcacataatccctctctatttgtggtgtaacaaatcttatttgagataactgggtcaatgtctagggcttacagggcggggaaggggggaggaagggggactgagactctcctgtttctatatgctatgatgggatttgacctgcaattgaacctttcctcaaacacaaggcacaaacctgccccagcccatcatcctcccacagaggcactgtgaatgtataaagaaaggcgatgctaagaaacrtgctgcaggggaggctggcacattctgctccttagctaaccgcacaggcccatgggtccacacacatcagaccatggctctctgtggtctatctttgccattactttaaccaggctgtttctcatgcgctcatggagggtgactgaagatgccaccccgaggtgcaccctcagcctcgctggacacttacggctcgcattctccagccggaccaggcagttgaggaagtcatcgaagtccagctggagctcctcatccgcatacctgagcacaatcagctgcaggaggtggctgctcagctgaaagcctgtggggacaaaggaggagacccaggactcgctgtatccgagccccgaggtgagtctgcacctttgagggagctcccaggcagctgaggagagggctcagaagaggaagccactgtttcactcctcaaagckggggtccccagacccagtgggactgctgcccttggtgtgaatgcagcgtgagagtgtgaatctgtggtgcaggggcgagtgtgcgggggactctcaggcgtgctttctgtgtttaatggcttctgagtttagcgagtttgtgatcttaattttgatgctaacatcacccatagagtctcgctgactttacaggaagctttgtttgggggaacttaacactgggtggtgtctgagccccaagttcattcctacaccagcctcccctcgygttctatgtctcaggtcacttccagctgtggccctagaaagtttcttggaggggatgctgctgcccacggagaatgatactctgccagggcccattcctacacatccacgatgggggaagaatgacaggctatagccaggaggcttggatctgagccctggcactgctccagccgtggcatatgggttcagttctctgggctttggtttcctcattgtcaaatgaggagtttagacaaagtgaacttccttctggatttgatatttagatttttttttttgagatggagtttcactcttgttgcccaggctggagtgcagtggtgcaatctcggctcagtgcaacttctgccttctgatttcaagtgattcttctgctgcagcctcctgagtagctgggactacaggcacctgccaccacaactggttaattttgtatttttagtagaggcggggtttcatcatgttggccaggctgatctcaaactcctgacctcatgatccacccacctaggcctcccaaagtgctagcattacaggtgtgagccaccacacctggccagtgctttgatttctaattagtgcccttagaagtgatttctttccccctttcatttttgtctacatgttcactttctaggaggtgttcacaggattgttcagaaatccacccagggtctttctgcttcttcctaattccagcagaggagcaggcaggtcagacacagagcacagagtctctggagcctgcacggcagtgctggctgccagccttggccagaatcctgatgtttggggctagaggagggggatgaggggcgattctccccacaccacgtcagggtaggaaagacacagccatgcccctcctctctgagtgctccctttgtcccctgctcagttcctcctcctaccatggaaacagagtcatcatcccctaagaaaatcaggcgccccttctcagcctggcactttgctcatttataaatcatctgattttcttctccctcacataggacccgagatggtcctggctgtgtatacttcatccttttatcaggcctgagcctggacatgtttccagattttgctttccctgggagggaaccactttaaaaggttcaggaggcccctatctgtgaggtgtgcttggtgagaagcgcaggcagcccggcaggcgggaggtctgcagagcgctcgtggaaactacggttgtgtgtgcaggacatgggaccacagagatgccgacagccatccagcaccggacaagagtgggaaatgccacctggagcccagcctttgggtaagggagcagggtataaactatgatgcagtcatccattttggattcagagtctgatgctgataaaacccgggacagggccacaggtggcagagggacgtgcggaccccaaaccatgggtgctgcatgctctgtctcatccacgataacaaccatctgagagcagaaatgagaagtttggaatcactgcagcttgccaccaaagagccatgtgttaagtactgggccagaaaacatggtcagaggctatgaggcctccagagggcaggccaagttcatttttagcagatacatttaaaaagtttctaccaatgttcacagtggtttaaaatgagggccctggtgtcaggaagtgagtcctgggtctgaaccctggtgccaccactccaagggccrtgaccttaagaatcaccaactgggctcagaggcccacctcctgggcagcagagagaagacctgccatctgctcaggttgcccacaggcagtacctggcatgcagtcagccacctgtactccagtcttttctttacctgcagctttcagtgcagtccgtagttcataggtagayatggtgccggacttgtcagcatcaaaccgaaggaaaaggttctaaagggtggagagcagaagccttgagaaggagcgtgcctgaaaggcatcgctgrtggcagtaaatgggtgacagccagcccgggggagctaccctctaggggccgcagaggccacagttggactgggccttccaaaagaagtcggtctcccttttgtcttccttttcgtcttgggtggaagcacggtggtactcccgtaagyatcggaatagcatgatgctgttttcccttctcccctgtccraatacaattcctctagcctatagcctgcagcctgctgcaccattttaaatcccctctgctctaggttcactgggtcccccagaggccaagccctgctccaggttacatacaatccactgcttcagcttgtcccagaacactttgaattcatcaaactccagcttcccattgccgctggtctgtgccatgtgggttaagggagacatgagcagtgtttcaacctgaggctcctcgtgggacctcagctctgggactgcagagggggagggccgatgggctggcctgggtgcacaggtttggggccctggggaagtggttttaatgattaaaccacaaatctctgaagaggggaaacggcagaagtggaatgggggtggtccyggaaagttcacaaaaacagaactctgttcccttggatgggatcccaaagtggcaagaagacccccaagtcccttcaaaagctccccacccccaccactrggcagtcttgtgcatcttgattctgatccaatttcagcatgggggtcccccagctttgggttattttctgtgaagaagactattctgctggctaaggatgtcatgttcttggagagtctgcactattgaagattactctactgtgcttaaagcccaggatccatgtctatttctgctcaaatatttggaaggatacgtccatcagggaaatgatgtttttacaggagatcaggcttagcttcttgaatttgatgtccttttctgaaattgcacatgaaagctgaattcagttgacccgataagataaacctatgtacccatctgctgaaagcccaataatgtggctaaatccagggctgttgggggctgtgatgtggctactctcttatgatgctggtaggagtagaagttaacatgacctttcagaaggaaaattggctaaatgtgaaaaaagcaataaaagtgggaatacgccttcatccatttattctagttctaagaaccccgagcaaagaatwacatatgaagatttttgtcatcatattatttatagtggcaaaaatttggaagtgaaataatgaccaatagagaggcatggtcaataccttaggctatgtctatataatgaagtattatacgacccttaggaatcatgtttttgcagcatatttaatggcaggatttaaatttgttggagaaatttgtactcccatactgctgctggtgaaaatgtgaaatagtcactttagaaaacagttggatagtttttaaaaacattaaacatagagttaagcaatcctcttaactaaacatataattaagaggatggttatgccaccatgtaaccatagactgttgcattgtgatggaaccatcctcataactatatacccaggagaagtaaaaacacatgcccacccaaaaaacttgtataggagtgtttacagttgcattattcataatgaccaaaaaccggtaacaacccacgtggccaccaatagatgaatgaataaacagaacagggcccatccatacgatggaatgttgtctggctgtaagaaggaatgagacattgatacatgctacagcatggatggacctggaaaacatcacaccatgtgagaaaagccagtcagaaaggaccacatattgtatgattcctttttttccccctgaaacggagtattgctctgttgcccagcctggagtgcaacggtgtgatcttggttcactgcaaactccacctcccaggtttaagcaattctcctgccacagcttcccgagcagctgggattacaggtgcccacaaccacacctggctgattgtgtgtgtgtgtgtttatttttagtagagatggggtttcaccatgttgaccaggctggtcttgaactcctgacctaggtgatccgcctgtctcggcctcccaaagtgctgggattacaggcgtgagccaccrcacccggcctatgattccttttatataaaatattcagaatatgtaaatagaatctatagagaaartagatgagtggttgcctggggctgggggaaatgggtacagggttaacactgttaatgggtaaagggtttcttgttggagtgatgaaacattctaacattatatgtctacgcatatgacacacatgtacatacatgcagatacacatatgttaagagtggttatttatggtggtgagatcatttgtgactatctttgtcattaggcttttctgcatttttaagaattttctactataaacctgcatcgtttttggaatcaggaaaacaaacaatgaaagctatttttaaagtctacctacaaatcagccctgggaagcagatctgcggctcggaggagcagggaggggacccaggcagtgtggtcgcttgtccctccataggtgccccaggacccygatggggttggcacttactcttttgcagcacagcatttaaaacatactcaagttcctctgctgtcacctccatgtcctgttgaagtggagacaattgtttkttatagcccttggcaccttcttttatagtttatttttgttttaaatcagttctgagcttcatttggctccagtgacagaccagccttcaggaccctgctgtgggcagatgtacctatctcctgtgtagctgcagctatgtgtctcatatgtcacatgttttagggrcatgccagcccaactaggagagagcctaacttgagagacatcccaacccaggaaagcgcatgaaaagctgggcagggcaaggcagtggtttcccagcttccctgagggtcagaaccaactcctggaattgtcctaagctcctcagatgattcctatgttggaggcagtttgggaaaaccagactgagtcttcctctgtacagtagaaccacctgcagagctttaaaatagtcccgcatctggggcttaccccagggaatcttgaaatcagaggacctgagaatatggtcctatttttaagacctaggagttgatttagaattaagaataagggtgaatttcagaatcatggatctaaggcactccaggaaatctcagcagcccccaccccagaagctggttagaaatggagagtctcagaccttgccctgagactcaggctttttttttttttttttttttttttttgatacagggtcttgctctgtcatccagattggagtattagtggtgtgaccacagctgactgcagcctcaatttcccatgctcaagcaatcctcctacctcagcctcccaagtagctgggactataggcatgcaccaccatgctgggctgattatttttgcagagatgggctctccctatgttgcccaggatgctcttgacctattgatgaggaatctgtgttttttttcccaggatgcccaggtgactttatgcacatgtgtgtttgagtagcactgacatagacctcattttagtcagggttttgcgctagccgtgtgttatgctgtggagtgcttctaacacatgtccgtcctgaagcctctgggcctggggaatgggggtttgggatgtttggtgttggtaagaaagcactgccccagccaggcccccactgaaagaggaggaaagagaaatggagccatgtgcccaagtcatccaactacttggaagaaaagcaggacatgagtcaaggagggctgaactctagaggtactttttggttgttaataaaggtcgactgaaactcctgcaacattcaccgcttcccttccaaactctggatctccatctgacaacttctgcgcacccgcatgaacctctttaactcctctgagcctgtcttgctgggtctgacccagcatgctccagatagcacctggagcagggaggtcaccactgccttcccccctcaccatgctctgtcccgcccagggctgcgctcagccaccttcctgctgtgctttaagcagtcacatgagcccccattttctccatccgatcctgtggtcccctaatctccctgycttgcctgtttattgcagtgcctaatatactaccatcagacagcccctaggtttagatatcacccctccaggtgacccctttcataattcaggaaccccagtttggggaaacacatgaagctaatagagtcattagcaccttgacatgaattagttcatcagctcattgtatttatggctccaagagagcacctctggggcagtttctagaaagacttccctcccctgaccccagcaggtggaggaagagcctggatctgtgtgaggctccatccagtgtccctaaaaaggaagctgagcagtggaaagagctaggatagggtgggggacaggaagttgcaattgaatagggacctccttgaacatgatcccctttactacagcaaacagagtattctaatggcagtgattttcaggcagagttcaaaggagtcacctcttcaaggcttgctctagcctcccaaagaaagcacctggggccaggcgtggtagctcatgactgtaatcccagcactttgggaggctgaggccagaggattgcttgagcctaggagtttgagaccagcctgggcaacatagcaagactctttattatttatttttttaattagctaagcatgatggcatgtgcctatagtcccggctactcaggaagctgaggtgataggatctcttgagcccatgagtttgaggctgcagtgagctaggcttatrccactgcactccagccagggtaaaagagtgagactctgtctaaagcaaaacagaactaaaaaacaaagcgtctgggcctattccaagcttctttgggctcactggccccatccacagccgcagactgtgtaagtaaatgttgtaaacagggtggtctttgggccttgaatgatcagtgctggtcttactttgcaacaagctccatcatgcctcaggatgacgttgctgaccaaccccacgactgcaaccctttgctaggaagcaggtccaggccctcagsctggtggggagatggaagtggggcatgtcctacctcaccagcgacttgttcaaacagagcccgaaaccrctgctcctcctctgtctcctggtcaggtggagttggctttggaggctaaaaaacagccaaagaaacttgcacaaaatgatccacaaaaaagaaacatgacaaaaatagcaggaaagaagccaggascctgtgtgcccagccccatgtcaccctcctgaggcrgtgtgcacaagctgcgtcctgtagcgtgaggaacattttctcatgaaggctcttttagaaggtgagactagaaggactttattagctggacctgtggagcccttctgccttacagacgaggaggccaaaggaccttgacccgtgcctaagttaggtcctggccattggattttcatgcttcctgcccttcctctggcttacttcttaccaccctggactggaatgacttacttcatcatctgttttgatagctggtaaaatcgttgaaggcaagagtctgtttctaccactaagctctgggcttggtatatagaaagagctcagtaaatgttttgggtgatttttggtttctttggttttttagcaccattaataagctgtgccccagcatggaacagcaaattccctcctaaaagcagatctctgctgtccctggacgtgtcagactatttccagctatagtatctcagggcctcttgcgagtcctccagcccttggacgagggtaaagccacccccatgtcaccccttccacaccacataacataggggagatgtaatrtgttcccctgagtccacagtaaaaaacatctccctgcctctctggttttcttttcattgattagatttcttaaaatacaattaaaagtctacccacttcagaagcggcagccttctctcaggtggagttggtagtgtgaaagttattgagtcaaaatgaagtcactaatgttaagaaaaccctgacaaatagagctcgggaaggccagaaggttctcatgcttatttgcctgataacaaaaatatcacaaaaggctgcaaaacccacaacctttcacagaggccctcgcaaccatacacaaaaatacttctacctctgcctagcaactgcctgtccaacatcagactggcttcacttttgttattgatctttgtagccaaggataattatttcaaaacaattatgtaatccttctcattttttctttaaaaacctttgtcctcctttacctccccaaataggtgcatagtttactatggcatgcaccttcccattgcagtgctttatccctaaataaatagcttttcttttagagagtgtctctgtgtttgttatttcagttgacagtagcacagaggaagatgacatsgaacagaactttataccaagcacccacctcactcccatgccaggtccttgtggactagaagagcacagactagaacacacacatcttggtctccaggaggttagaatcatagatgcttacttgattgcatgtaaccatccctgaactgcagagttttacatgatgctgtgattagaaggaaggtttccagaaccatcacctgaatcccatactccatagcaacatcagaagactcacctcaggaaggtcaatgtctacatttccatccatatccctgtaggggcagaaaaacacactgcctcaattgtggattaacttcccattgggatctgcagagctgaagagcccagagcctgggaaggttctgtccctttgaatcccttattgttcagtgctgtttacatttcacagagtttgcagaccccatgcattgacacccccacccttagtcactcagaccttgctcagaatgtaaataagagggacagccattgtgttagaccattcttgcatggctatagagaaataacagagactaggtaatttataaagaaaagagatttgattggctcatggttctacaggctttacaggagcacagtgctggcatccgttctgcttctaaggaggcctcaggaaacttacaattattgcagaaggtgaagggggagcaggcaagtcacatggaaaaagcaggagcagggtggtatgggggagttgccaaatacccttaaacaaccagatctcgtgcaaactcactatcgtgaagacagcaccaagccatgagagatccgcccccatgacccaaacacctcccatcaagccccacccctaacactggggattacaattcaacatcagatttggtggggacacatattcaaactctatcattctgctatgggccctcaaatctcatgtccttctcacactgcaaaatataattatgccttcccaataacccccaaagtcttaagtcattccagcattaactcaaaattccaaagtccaaagtctcayctgagataaggcaagtcccatcacctatgagcctgtcaaatcaaaatcaagttccaagatatacaaattccattttatacttccaaaatacaatgggagtataggcattgggtaaacattcccattccaaaaggccaaaagaaaggggctacaggccccatgcaagtttgaaacccagcagggcagtcattaaatcttaaagctccaaagtgatctcctttgactccatgtcctacatccagggaacactggtacaaagggtgggatcccaaggccttgggaagctctgtccctgtgactttggctgctgtcatgggttgttgagtacctgtggcttttccaggctcaaggtgcaagctgccagtggatccaccattcttgggtctggaggatgatgrccgccttcccacagttccactaggcagtaccccagtggggactctgtgcgagaccttgaacctcacatttccccatctgcatagccctagtagaagttctctgtgagggctctgtccctgcagcargcttttgcctaggcatgcaggcttttccatacatcctctgaaatctaggtggaggctgccaagcctcattcagtcttgcactctgtgtgcctgcaggcttaacaccatatggaagctgtcaaggcttatggcttgcactcttgcaccctctgaagcagtagcccaaactgtatctggtgcctttgagcagagactggagctggagcagctgggatgcaggtaacagtgtcctgaggctgcatagagcagtggggccctaggcctggcccatgaagccatttttttcctcttaggcctctcggcctgtgatgggaggaggtgctgctgcaaaggtctctaaaatgcctttgaggccttttccccattgtcttggttatagcacttggctctttttagttatgtaaatatctctagcaagtggttgctccatagcctgcttgaattcctctctcgaaaaagctttttctttctctgctatatagccaggctgcaaattttccaaatttttatgccctgcttcccttttaaatgtatatattccagctttaastcatatctttgctcccatatctgagtataggttgttagaagcagccaggtcacatcctgaatgctttgctgcttagacatttcttcttccagataccctaaatcatcactatgacgttcaaacttccacagatccctagggcatggacacaattcagccaagttctttgctagggcataacacacataacctttgcttcagttcccaatgagttcctcctttccatctgagacctcggcagcctgaacttcactgttcatatcactgtcaacagttaggccataactatttaaccagcctctaagaagttataaacttttcctcatcttcctgtcttcttctgaggccttcaaactcttccaacctctgcctgttatctacttccaaagtcacttccacattttcagttatctttataacaatgccccactcttctgtaccaattttctgtattaggctgttcttgtactgctataaagaaatacctaasactaatttacaaagaaaagaggttcaattggctttacaaagaagcatggtgtattccctagaagttaacttaactccttgacttctagggagacctaggaaactacaatcatggcagaagggggaagagtcatgtcacatggcaaaagcaggagcaggggtggggcaggtgccacatactattaaccacatctcacaagaattcactcagtatcacgaggatagcaccaagccatgagggatccacacccatgacccaaacatctcccaccaggctccacctccaacattggggattacaattcaacttcagatttgatggggacacatattcaaactaaatcagccatcaccaagaacttgtgaattctggatttatgaaactaaaagaagttaagccagcagtcactccttatttctttaatgtactttaacaagggcaactgataaagtgttttgtagaatagcagcacctccaaagacgcataaacagtgcagttgcattacacattcactctccatgaactttgcatcttcaaaggagatacatatctgttggagaccattcagcctattgagtggtaggcactggggagggggtgcattttaaaagattacaaagttgaatcagaaccaaaaaaaccaccwttttttttagacggagtctcactctgtggcacaggctggagtgcaatggcatgatctcggctcactgcaacctctgcctcctgggttttaagtgattctcctgcctcagcctcccaattagctgggattacaggcacgtgccaccatgcccagctaattttgtatttttagtagagatagggtttctctgtgttggccaggctggtctcaaactcctgacttcaggtgatcctcctgcctcggcctcccaaagtgctgggattacaggcatgagccaccgtgcctggcctaaagaycaccttttgaagctgcatccctaactcctgcctctcatcacagatgtaaattcctgattccactggtggggttggggagggatgggtgtctctgtgcttatgttagggaaaaagaggaaaaatgatgcaatcatgtttttttgctattcacatatttagggggacttgtaatatttggatagtagtaatattaagaggaggagcaggcttcagcttttgatgatgctaaaaacatttggaagaatacagtctcatagactaaaacttgaagggctctcaaagaaaaactgatacaaagtcaaagggaatacaaataaacattaacatcaattgggggtagtcctccctttcctcctcatcccctgggcatccataacataaccctttcagaacttctgtttgtttaatcaggagtctgtctgagagctaaaccaatgcraacacagctcagtgtgaatttttgttaccaagctacagagctgattcttatactcaatatcatagcagattaaagaatcttgttcagagcaagattgagtatggagttttttgccatgtacaagtcaccttatgcatgtcagtgactctgagctcaccccactaataagatagagaacaagaggcatggcattggcataacttgggtctctcttgttcttgccacccataagagatgtcaatctgcatggatctcatacagggtacttttgtgtgaacagatactaggatattcatccccatcttgtactagtatctgggagaaggctggagaaaaattctctggtagagtgtttaaaaattaaagacttttctgcatctatttagccaagagaaagaaccatgccttttgtaatcagcttgggaaaccccactagacttcataattgagagtcttttcaatgcatgccaccaatctaattctctctcactaaacgaaagatgaaactagagtgagtcatgtattcacagctgtctctcttgttaactctgtgcagattgatcttttgttggagacttatctagcttaaatacagaattagcagattttagcgttctccttaatctttagaatattgtcatcgggaaaagaaatggattcctctgtcttgaaccatttttccccctgtgccacagagcaaccaatggtgaatgggcagtaatgggaaacattttccatagaagtaactgatataaagtaatttcgctaagacactgtgaggaaaatgtggtggaatattgggtatgtaaaatgagaggcagatttgccaacatttatttaaattggagctgaaagaacatgtcattcttgaaatttgcaatagccacccccttcatcatgcccagaaatgtctagcatccctgcatgtggctcttatccaagaagcttcttggtaatagggtctgaaaaatgaaggtctccacccaagaatgtcttgtgagcatgactctgggaccagtagaaaacagcaacttttcaatggtttgcttgagggagcgaggagcagagctagaagggatatgtgccttgccttgcagataagctaagaaagtgtcctgcagcctggcgtggtggctcactcctgtaatcccagcactttgggaggctgaggcgggtggatcacctaaggtcaggagttcgagaccagcctggctaacatggtgaaaccccgtctctactaaaaatacaaaaaaaattagccgggtgtggtggtgggtgcctgtaatccttgctactcgggaggatgagccaggagaattgcttgaacctgggaggtggaggttgcagtgagctgagatggcaccattgcactccagcctgggcaacaagagtgaaacttcatttcaaaaaaaaaaattaataataaataaaagaaaagaaagaaaccatcctgccttgtttctcaggtacacatgggaaagggaagaatggagtcttggctccagcagttcccaggtgacttctgtgtgaataaaccactaaaagaagtgggattctggaagctgttcctctgactcaccgggtaatggcttttttctctgaaaagattctcagacagaaatcagcttcctggtggggctcaaaagtgctgggaatcmggatgtactccccagggggcagcttgaaccggtcggagacttctctcaggttgatgaacgtcttgcttctggcccgagaagcgtggtatctgaagaagtctttgttcaggtgttcrtctttgtcagggcactgcaatgggcaagaaagggaggggtttcctagggaagttcctcttggcttttcggacacaattcatggactcttggttgagtctcgggtgtgagaccgaggaggagccgcgaatttagaactcagatggagaactctgaaatgcagtgtggttcccacctacctcataaatggcatagccgattgtcagcacattggcaccaaatctcttgagtttccttctatctttctgcatcagggctacaaggaaactacactcctcctgcccctcatctttctcagtcagagacaattttatttgtggattggtccaaaaggtatctgtcatttgggagaggtagattattttccccttttaaaaaacaacccacaaagaccacacacacacacacacacacacacacacacacacgcacatacacctatctgccctcattatatgtcctaccaaacatgagaaagtaataccttctctccctgttcaataagtcctcctaccctacttttgataatccccaacgggaatgcaaaatatcctctctttcatttccaccttctcttcaaccatttcctatgcagtttcttaaggacattcttctgggtctagtctgctaaagcttgttctatcagttttttttccacttagtatttcaaaggagagtgcagtggacttctggttgtccccctggcatctacttgatggtgggccgtttgagtaggattgacctcgagcactgctccagcatgaattctgattggtctgtgccagtcctttttgccaccgaggattggacaaagccaatcaatgcatagcattcactggacaatattagttcaaggaatttccaattagagggaagttgagggcttttttttgatacccccaggagctcttgctgttcgtgtgaatgagggctcaggaagccctggatactgctgccagccctcctgtgattataaagaaagccagacagagaaagaagtcaacacataaaagagggcagaacagtgaattacaagcaaatggaaccagggccctgatagaactgtgcctgaagcccaccctacttttcctctgagctcttcaattatgtgagataacaaatcctttctattgctaaactggcatgagtcatgctttccattacttgtaatggaaaataacctaagtggtaaaacaaaggaggtttccccaaacaattcttatccaactaaatctttgcagccttttttccccagtcacttttgaaaccttactatgtttcaggctttctctgaggacccggcccttatcctttggtgtcctgagttggaagggacacttgggagtggcagagagagtgacaggcagcctacctacccaggaaattgcggcagcccccagccgtggagccgcgaacccagcttccctgatggaccgtcacctcccatttgtggatcgcgtcttcctycagggcatcgggagtgaggttgcagatctccactttatcaaaktgggccttgaagtcctkaaatgccatcctgcagcaaagckgagagacacgatgcacaggagggcaagagtgagggcatcatccattcactcattcattaaatcattcacttattcattaaatcatcttgttcctgtccgcaaggagtggggggactgcaaagtgtggggagatggaaaattttttaaaagtaaaataaaggttaaaaaggtaaaaaccaggctaaaaatatagattgattgtagatgttaagtgctacagagaaaaaccaaattgggctgaaggatgggagcgtaggggtgggatgctattttaaacagggaggtaagagaagcccttactgatggggcacattctgagtggagacctgaactaccaggtcctgggcagggcagctctctgggggtctaggcagatggacagcaaggccccgaggcagagaggtgcttgaggtgctcacagaacaccaggaaggcacgaggtgtctgtaaggaataagatcaagagatcatagtacgtcaaataggtatagggattttggctttgactctgagaagatggagagcttttagaaggcagtaaacagaggagtcacatgctccatggctgctgtgttgagaacagactttggggacacaagtggaagcagagaggcagctaggaagttagtgccggtgtccaagtgagagacaagggtggcttggtccaggctgatggtatgggaggtgatgaacagtggccagatttgagacacattccaaaggtaaattttataggatttgctaatggactggatgtggggaaggagcgaatgaaaggaatcaggatgtttgatttgagtgactggaaggatggagatggggaaggctgtggtggggcagtttgagagagaagctcaggaggtcaggtttgggcacgtgaatgtgagatgtctattatacattcaaggagagatgttaaagtagaccattgaatatgtgactctggaatcctggggaaaggagctgaagatagaaacctgagaattagtgtaaagatagtttttaaagtcaagagaccagacgagacgcctaaagagtgggaatagacagccaggagggggaccatggatggggtcctgggacacctcagtgctaacaggttagggagatgagagggggccaggacaggatgttgagaaggagctcaggtaggaggaggaccaccagggcgtgtggtcccccgcaatccagcacgtcaagggctcctgatggatcaagataatctgatcgagcaaagtgagagtcggtggcgtccctggcaagatcagggtkagtggggtggtggggcacactcatagctgagtggagtcgagagagtaagggagaagaggaactggcgggcttgctgtagaggacaggagagagctgggttggtcacttgagtgggtcaagagaggctttttttttctttgcaggtaggagaaatgatagtgttggagtgctaaggggaatgattcagaagaaggggggaattcatacgtaaggggagagaagagagttgcaggaggtacatcctagagcyggtgaagaatggaaagaggctacacagggcttcagagtcaggattccaggaggaagggctccacgcacagagtgcatgatttaacaccacccatcaccttgggcaggctcagcccwggtgttggggctgctccttcaagaggggcagggcaatggatcactcacatggacgctcttctttgtggagcytcctgctgtgaatttccgagtttcctctgcccggcttctcccaccgtctgcaccagaccttctttccactagcctgacctcaggtagcctctcaaactctggtttctacctcctgctcatatgcagcaattactgtgatggtactaattccagaactcagctttcttcctgcagtttttgctcctctcttgtaaccccctaactcaaagtcccctgtacttcaaaattcaaagtttatctgtaatttctaatttgacagcttgggaatctctcaagcaccctgcatgtgttccacaaatctggggaacctaaaccctcatggttcccgaggcagagatggctggcagtcatcagcacaggaccaagactgcaccccactccttccatttgggagtagaatgtgagccgtgacgcatttacttctgagtcaagatttttagaaagtgagagtgtctttttcaatgttttattttattcttctcttctgctggctatgtgcagatgatgacgtgaccytagaagatggcagagccacacaatagaaggcgtttgggttcctgaatcactgtatgaacagagccacccacagaatatgaacatcctccctggactgtcataatgagtgaggaaaaaactttactgtgtttgagcctttatatatttggggtctattcactactgcagctagtgttaccttgagtcattggtgccttgaattacagaactgccacaacgaaattctaaaatatgttagcagttgagcaagagggatcatggaactgttcgagctggaaaatggttatctatgttatgcagtggcaaaacattgggtaaatctgttgcatgttgttatggactgaatgtttgtggtctcccctaaattcatatgttgaatcctaaccctcgaagtagtagtgtcaggaggtggggcctttgggaggtgactaggttgtgagggtggagccctcatggatggggttagtgccattataaaagaggccccagagagctgccttgccctctttctaccatgtgaggacagagtgagaaggatccatctataaatcagaaacagggccctccacagatacaggtactgcctgtgtcatcttcttggacttcctggtatctagaactgtgagaaataaattcctgttctttgtaagccactcagtctatggtatttttttatagccacccaaatagactaagacaactataaaaatacagaaggcagaacaaatcactactgaggctgtgttctatgggaaaagaatgaaaaaggctggaatagtcatggttttgggttgtagtattttttttttttttttttgagatggagtatcactctgttgtccaggctagagtgcagtgatgcaatctcggctcactgcaagctccacctcctgggttcacgccattctcctgcctcagcctcccaagtagctgggactataggcactcaccaccacccctggctaattttttgtatttttagcaggggtggggtttcactgtgttagccaggatggtttcaatctcctgacctcgtgatccacccgccttggcctcccaaagtgctgggattacaggcgtgagccaccgtgccctgctgttgtattttaaaagctgttacaagaaagagatgagctcaggcaagacttgattggttggagcacatgaaagggaatagagccagaaaccagaaatttgtggtctcacagggttagaagggccaacttctagaacccaaacaggaagaaataagactgaaaaagattctagagatgaaggcccaatacaaatgttcaattaaacaaagagattcaggccaagggaaagtccagagtagaaatgtttacttcctacgtaggtcgatatctttagatgctctcagggcagctgccttcaaaggtacctctcatcaagatgggtgtggagggaatggatcctgtgagcagtagggctgcctgtcttcaaattcactgtgtaaacctggatgacaaagagtgccaaggaggtgtgtcaggctagagaccagaggctcttcctctattggattgcaggaaccccctgaagactcttcaacaaaccgagagctggggtgagcccccaccaagacaggagggagattaaatttccctctaatctgggtgtatatgaggagtctgagacagatgaatttgatttgccaaaaatggagagagaaggctgggcgtggtrgctcatacctgtaattccagcactttgggaggccaaggtgggtggtttctctgaggtcaggggttcgagactagcctggccaacacggtgaaaccccatctctactaaagatacaaaatgagtcgggcgtggtggcgcatgcctgtactctcagctgcttgggaggctgargcaggagtatcacttgaacctgggaggcagaggttgcagtgagacgagatcgcaccactgcactccagcctgggcaataagaacaaaactccgtctcaaaaaaaaaaaaaaaaaaagaaagaaagaaagaaaaaggaaagcgagagagaagcacagtgctccttacgccccagggccatgggacttgctcgtatctgcagttaacacaggaacaagcacggtaccagaattccccatcatccagagcagtgtgacacagacgyttctgctcagctggaccaacagaacgccactccggagaactaggagtaaacaaaattggtgttcaggcagaggtcatgatgaagagcaacaatggccttgatgtggaacccacagtgtgcggttatggaggaaataagacctgcttagtaactactcactgggtcccaaaaatgcacccagggatgtagcggcaggtgagccactggcccccaaataagagggctggtcagaaagtacatctccaagtgttgctgatggataaaatacccctgaggatgatctgaaccaccgacatggaagattatcttgggatagtcacaaggcattgcatgcccgtggggtagcagaagagcccggctggaagccacaagtctgctgactttcgtgcttggcctccaacttgccatgtgacctggagcagtacttggcccttccttaatggacaagctgacacttggaaaggtgataatgccttacacctgcccatgcttgatgttgtctgtacccggcaccttttgtatgtgacctcgctggcaagccaggtggggttctgtgagctaggtgtgcccgtcctgcagataagagggctcaggtaggcccatggaaacactctcagggaagagtaggggtaggaatggctgcctgtcactctccaaactcaggatttgtgactccaagttcattgcattttctgtgactcccacagccgcctccaaatagttcaaagtaggtcaccactgttgcggtgctacagccaacgtggcagctccctctcatcctgtgatctcaactcaacctcaggggagtgctcaggtgatccaaggggaggatcagccgggacctgtctccaggtgctcgggccagggtcagaagagtggaactggcagccattattttcttttggagccattatcctaagtggctcacacccagataattggcctgacaggctggccatgcggtgccttcaaccctactcacatgtcaccagcagcacagcgaagtcagggartcgggayggcgcctgcccctcccatcacccatggaggctgcatgagtggaagacaaattttattccagccttggctctcagtcactttcttgatttctacctctgtgagtcccagaaaatgggagacaatggcccattttccctttataggctacgatctcaaagttgaggggcactgcacatcttacaacgtgacgcagtctcactaattttggtttcagtagttctctgtgctttccatttctgccaggagagggaggccaatctctttcctcctcaacccatctcagctcatctctgccaatgcttcttggttctcagaaggcggcagccaaggccagagcagaggatggtgggacgagagcctccatggggacmatgacagcctggaaagcacaggcctgtgtgccctgccctcacgctggggtctggctaatacagcagcggctgcaccatgtctggygacctggtagctgtgtctggactgaagacaaacactggctcagttttaaccaagttctagactagcttcagatttccccagaagctcaggggccatggatgtggcaggaaagggcttcaggagcccaacaagcagcggacgagcaacagcytcaggcaggccctgccacgcacccacacaaacatccctggttcttagtcacctggtccacttcccaagggaccagagctggaggagctgtggggacacacacagaaaaggcagacctttcttgataactgggggccaaaactctggttaacagctctgtaatagataaaattccaattccatgtcctctattttttttcctttaaaaaaaaaaaaaaaaagagatggggtcaacatgctctgttgcccaggctggaatgcagtggtgcaatcatagctccctgcagcctcaatctctcatactcaagtgatcctcccacctcggcttgctgacgtgttggaattataggcatgagccaccatgctcagcctcacttctatttctctgctgggctattgggcctctgccatggtcagtgaccatcagagagaatcctatagttacatgctaggtaatatttcagggattccgacactccaaatacacacacacacacaaacacacacgcayttatgcatatgcacactgcttactggagttactcacaactacagataaagcttttcaccatatcactgggttataaacatcaccatgggaggtaacacatttatgtattgacataaatacaattcgtgaaagttagagtgctgttgtaaaagtctttcttgagaatcaaccttgatgcaaggtgggcctgagggctgaaaggggaggaagaaggggcacctcagaatcrggacaggatcctgagtcagagcccgggaggatagtagacaggccactccttcacatgtctgcacaagccagctytggccccacacgccccgggaaccagccagagaggcaggatagggtgactgacctgtcgctccaygacccgttccactcaacctggccccaagggttccggattcggatgagctcgattctctggcctcggaagcttacctagaagggaaaagcatgagggaagtgtgaaatgataaatatggtggaggtttggccacattcatctatgagctccaggtggaccagctccatccagaactggttctgttgaaagtctcttgcctaaaatgctgctgaaggtatgtagaagttcgccagttcttaaccagcccttggaaccttctaattcctattgaataattgctactattgccaatgatattatattaagcaccaaaatgcttatgccacatctgggaagtaaagtagaattgcaattaacaagaaattagtccatatgaatctaaaaatgggtttctctctagacttggatctccctagaggcaggagccaagtcttaggcatcttcagcatctagcagartgaatggtaaagagtagtcctcaaaggtgctcatggaactattactgaactttcttcatcctagcatcccatgcacagatgaatgataagaaaataagcacatgttggggatttaaacacaacaataaacaaaaacagcttttaygtcttctagacccaatattctccttatttcaggtgtctgtgaggattcctgctgttcacctcaatcacccttgagcctgtgtgccctcaggctctgcctgggagcagggacaagggccaatgcatttgagaagggttttagaggagagagagtgaaagtaaaagacttctagttatcractaaccagaaactgtagcagtcagaatgttttatcctcatgcatttggcataaattatattttggatgtgtaaaaattcaagtaacatcaactcttcrgagtccaagatgtggcttgtggctcaccattaaaggggctcatttaatttgaaaggttcagggcaggtgagttccttgtaggggggagaggaagcaaaatcaagcaaaccaagatgatgagaggtttctgttgttacgtggaatacgtagaagatctaacctagaaacatcacatgccygcttgagtgagcaatctgcaagtcatctatggatggtgaaggaggacaaaggagccaacacaaatagctaacattctaaagaatcccaaagagtccaacggcgtctcacaccttggctccagtgaggaggaagggcagggtctcccttcagtgttctttactccccacgcattcagaggatgtcactcaaaaggtgggtggctacagaagaccaggtgcatctgcaccttctaagtactgggcttgagactggtccagggaggcatggagtgggcaaggcaggctgctgggctttgctgagcttgagtctggcagagtgatacctttggcttcttgtcctcctctttcattcaattctttctttctcttccccttgtgcccctcaaggatctctcctcctaaccaacagctcccttgaagtcagggtggtgctgtgtggagtctgggtgtcccccaggatcagttccaccctgggctacagctacaagaatgggactcgtggtgattaattttatgtgtcaacttgactgggccatggggtgcccagatatttgctttaaggttattctggttgtgtctgcaagggtgcttctgggtgacatgaaatttaagttgattgagtaaaacagattgccctccccagtgtaggtgggcctcatctcatctgtgaagacctgaccwgaacaaaaaggcagaggaagggggaattcactctctcttcctgggtgcctgagctgggacatccgtctctcctgccctcagactgggacttttaccattggtgttcctggtggctaggccttcctttcagactcagaccagaactacaccactggctttcttgggcctccagtttgcagagagcagatcgtgggacttcttactcttcacaattgcatgagccaatgccttacaataaatcgtattacaggtgatcctggaacaatgtcaggggttggggtgccaaccctcctgcattgtcaaaaaatcttgtattccctaaagctgaactccgaatagcctaccattgaccagaagtcttatcgataacrtaaagaaccaattaacatgttttataattatttatattatatactgtattcttacaataaataagccagagaaaagaaatgttatcaagaaaatcatagggaagaggaaatacatttactatttattaagtggaactgggtmattgtaaaggtcttcatccttattatcttcaygttgagtaggctgagaaggaggaggaggagttggtcttgctgtctcaggggtggtagagatggaagaaaatccccatataagttcaagcctgtgttgctcaagggtcaactgtgtgatgtagatagatagatagatagatagatagatagatagatagatagatagatagatagatagataggtgtgtgtgtgtttaattgtatgtatatatatttggttccctagtgattctatttctctgaagaatcctgactaacacaggactgaaggagaattgggaaagaaaggaaattaaaaataaacaaagaccaggcgcttacagctgctaaacgagttttgtgctgcggtggaatcacatggtttctctctttcctggcttgccgttttgaattccagcctgcctctttaggtgacataatctctgaaatgcctgaaaggcagacatttaaactgcaatgcactgaataaatgcctaagggattagcattgtcacatgtctccccatagcctgcagttggagttcaagtcgcctacctggtcaattcccgttacactgtaggcatgacccttaataagaccaaacggcgtccgggcctcagattctgcagyacttctggtctaaaacatggraaragcagmgtcacacccaccgtctaagtcaagcctcccctgctggatcagacccagctacatgcctggcccrgtcacaacctccagccccttctgctgccccaggtgcaggccatgtgcgtgggctatgcacggggctcccctaggatgtttagcagtgacatgaagcaagttccagtctcttcccaggatggggaggcgctcgcttccagtgtggactccaaagaacagttcactattttgtccccaaacagaacaacttgtcaccttcatgtagtatagtgtgagagagaagacacaatcacatacatcccagagacgaaaagaagaatataacaacaggacacacagctctgcgtcacaaacctgaaagtgcagaggaactggctaattcattagcaaaaaacagaccccaaggctaatctaagaggaaacagaaaactagaattgattaaaaaaaatacatagtgtcatagcagtccataaaaaacaacaaaaagttttaaaaagatgagataaaattataagtgtgtgtgtttgtatgcatagagaaaattttaaaaaatatcattagacttctatctgctatttttttcatagtacatgaaatgaaaaaaaaaaaacaaatttcagaaaactagatagraagatcccrtttcagtaaaatcaaaccaactgaccttgatgtttgtgtgtggaagtgtgtgcctgtttgtacgagcagatagagagctgggaaggatacaggccaggtgatcccagtcccagggtggagctggagaacagaggcagctgagaaacgggtgggagggaggtaaaaatgcgcctgtatgggcctcaagattgttccatctgatacagcaagtacatcttacctttgttatttgacgactattaaataaaaacttgtgttttatttgttatttatttattagagacagggtcttgatctgtcacccagcctggagagcagtgacacgatcatagttcactgcggcctcaaactcctgggctcaagggatcctcctgcctcagactccagacacacaccaccatgcttggttaaaacttgtgttttatttatttatttttattttattttattttattttttatttatttatttatttatttatttatttatttatttatttattatwctttaagttttagggtacatgtgcacaacgtgcaggtttgttacatatgtatacctgtgccatgttggtgtgctgcacccattaactagtcatttagcactaggtatatctcctaatgctatccctcccacctccccccaaaacttgtgttttaattagcaggaataaacactgcccccaagagttatgcccctccttgggtgtggctggggtacctggtacagccccagcatagtgcctggaatgcactatgcagccycagcatagtgcctggaatgggagcccatgagcaacttacatcartgaagcagcccagcagggagcctctcttcaaagccttctctagaatctcatagaagttctcgggggcctctttagtttggaaggtctctgccacacccccrgtgaagtcttccatggcctcgatggcgctgcctcccttcagagcttcatagctcccatttagcctgcaagggtggcaagagagagaggagagagtcagggacctagggaggccacyrgggcaccctgctttcagagcttttctaactaagcctgaagcatctcccagggcttgccctggctgggtggtgtggaaggaagacgggaagcaagttatcagggtttgtttggagcttcgaggaagccaaagatcctgaccttcctgcaagggaggcagtgtggtgtggtggtatagagcagcagctctggtgcctgagtggccgcaggttcaaatcctggttctacgacttaccatctgaatgaccaagtcgctagtgccttcattttcttatatgcaaaatgggggagagagttgtgctctcccttctaggactgctgtgaggttcaaatcgtgtgtctcactctctaacctcccatggaacggggcctggctatgtggatagagagaggccctttcccttcttctctggtctcacatactcctaaccatttttgtcatagtcatctcttttattcatatgcattttacatatatgtgctctgcttgatttttaaataagcttttcaatttagaattttagaatctggtgggaggtgactgaattatggaggcgggtctttcctgcactgttcttgtgatagtgaatgagtctcatcagatctgatggttttaaaaatgggaatttccctgcccaagccctctttgcctgccaccatccatgtaagatgtgacttgctcctccttgtcttctgccattattgtgaatccttcccagccacgtggaactgtgagtccaattgaatgtctttcttttgtaaattgcccagtctagggtatgtttttatcagcagtgtgaaaacagacttaatacaatagcttatttgggcttctttagtttttacctaatgtcctttttctgttccagaatcccacccaggaccccacactgcactgagtcctcacatatccttaggctttttgtggctgtgacagtttataagactgtccttgtttttgatgaccttgacggttttgaggagtcctgggcaggcatactgcaggattagaatttgtctaatgttttttctcctggtaagactagggctattaaagaaatgataaatgcttgaggtgataagtatctcaattaccctgatttgatcatcgcacattgtgcgcttgtaatcagaatatcaaatgtgccccatcaatatgtatactattatgcactattatgcatccataaaaataaaaaatgaaacattttttaaaaattaaaaaaatagctgggtgtggtggttggtgcctgtaatcccagcatttcgggaggctgaggcaggagaatcacttgagcccaggagttgcaggctgcagtgagctattacggtgccactgcactctagtctgggtgagagagcaagaccctgtctccaaaaaaaagtaaataataataaaaaaaagagtggggctattggttagtggaaggaagaccggagaggtaaagctsccctctcatctcatsatatcaagagtacctgccgtccacatgccttaccacagctgatgctggccttgatcacctggctaaggtagtgttagtcaggtgtctccactggaaagttgctccttctctcccctttccatgctgaactctttggaaggaatcattatgtgaaggccgcatgaaaaaatcagggagttatactccacctcctcaaggatggaatataaacataatttatttggaattattctacacaggatatatgttccttcttccacatttatttatacaatcatttattcaaattagtatgaacccattgatatttattttctacttgggtttattttgtgtttttttgttttgttttgtttttgtttttgagatggagtcttgctctgttgcccaggctggagtgcagtggcatgatctcggcttactgcaacctctacctcctgggttcaagtggttctgctgccttagcctcccgagtagttgggattacaagcatgcaccaccatgcctggctaatttgtgtatttttagtagagactgagtttcatcatgttggccaggctggtctcgaactcctgacctcaggtgatccacctacttcggcctcccaaagtgctgggattacaggtgtgagtcactgcacccagcttctacttgggttcataatccagtactgctttgtctatttcgttggttgaattcttctagctttggctgtttggagctccttcagtatgctcttgtgcccttttggcataacctcatttgtgtgtgtgtgtgtgtgtgtgtgtgtgtgtgtgtgtgtgtgtgtgtcttgcatgtgttctcattttctggcactataagatgatctaggttcattttatgtatgtatgtatatatgtatgtgtatatatatgtatgtatgtgtgtatgccccagtcctagaatcagccttatctccaagaagccccagttcctttgattgaagaatgatcttagaaaccaagacttgagacataggtgtgcttgttgctacaggattgtcattgcttctagttcctctcactgacaaagcaaggaaatacatatgtgtatgataacccaagtatagatcaatatatatgtgtatgataacccatgtacagatccatgtatctctacataaccatctctgttaagctaaatctaagttcattctggaatctccaactctaatctgcatggatcattctggcctcctccccttgcctatctgtaacctctcaatccaacagtgagaaactcggctcccgccatccaccatccgttcactcgattgttcagctcaatatacatgtataattagatcaatttttcatttgtactcctacaagaaacaattttagcaactagagcatagcactcacgtacagtttcttttgcctttaatcttacagactccactgatttccaaagttacttaggtcagcacctttctctccaaccccttcaatgaggttatttcatacgtttgaaattggctctcatagttacggacgccaagaaatctcacaatctgccatttgcaaactggagaaccaggaaagctggtggtatcattcagtttgagtccaaaggcctgagaattggggggttgatgatgtaagtccaagtttgagtccaaaggtttgagaacgaggagctccaatgtccaagagcaggggaatatggatgtcccagttcaagtagggaaagggaattcacccttcctttgtcattttcttttatttggatctttagcaaactgaataatgctcgtccacattggtggcagcaatcctctttactcagtctactgattcaaaagctattttctccagaaacactctcacagacacacccagaaataatgcttcaccagctatctgggcatcccttggcccaatcaagttgacacataaaactaaccataacaccatctatacagtttttttttggtgagctgttctgccaaccatttttggcctttttaagtgaccccaataaatcttttttatgtttagaaactagatggcacacagtttctgttgccttgcttgcatcctgatgtggggggcactcaccaaggggcagaggtgggcttgggtcccacccactggacttggaaacagtgccctttgtccccttaagcctgtctggtggcactgatggtgtttgcacagacctgggtgggacagagggcaagcgtgggcatctttggttcttatttgatggctttaattctgtcctgctgatttcaggattaatttaaccacagtatgcctcccctctattttgccacttttatgtcccacttggaggtagaagcaagaccatccttgcttctgtctctggggatagtattctcatggcttgaagatccaggctgaacctgaaagtggctcccaggagctctgccatcatctgtggatcaaattcaggctgttgtggcctttcactaacgagctagtgggctggaaattgagagcctgaggaaactgaggccatttggctggtgattaaaaatgaatttcttggttccacttatatgaggttcctagactagataaatcataaaaacagaaagtagagtggtgttgccaggggctgggggaagggaggaataggaagttatttgttaatagggacagaatttcagttttgcaagatgaaaaagtgctggagatagatcgtggtgatagctgcacaacaacatggatgtacttaatgctactcaactgmacacttaaaaatggtaaaatttatgtcatatacattttatcatatacgattatttatcgatatgtcatatacgaytttttaaaaataaaaaagaagcatcccgtaggacggacaattgatgtctctatatcmacgtgcgtaatagcccagatgtttgagccatgccagtgtccgagggaagtgtgaagcactaagtgctgtcggcacagccagaattcccctccgcttgccttcccagctcttccaaaggccagattcatggcccagggagaaaaagggtcatgaatgtagcsactgctcccaaagatgggcacatctaggctacgacaggaaaaccacctccaaccccgcttgagccctgagagggttgggtcctgccgagcctcacctgcaaacccagagccctgattttttcccagcccttagatgctcactacaaagactagtrtagagactcctgtcgggaggctgcytgagctggggaagctgtcactcacttggcgtaggctttttccagcaaggcgctccagaactcrttgtggtcggcagagtggaggaaaaccaagcggtccctgaaggtgggcaggcggtcatcgatcaccacgtccagccactcactgtgctgccagaactgttgcccaggaaaaagacagaaatgatgygagtcagctacatgggagctccaggccctgtttgtaaatgttgatcctgttgcttttttcccctctgaccaagctacccatagacagctttgaaaatcacacacgggttccaaggtagggcacctgggctttgtccaccaagttacaagctgagtattccacccagcactaaccattgacatcagctgaaagactcagggtcaacccatcaaagccgcaggcgatgcagggggcaggacaggactcacaagtagacactctacggtgctctgaattagtttttcttcttcacaagaaagttgtttttgtgggggagggagaatggtaacgtggggtttgggtttgctgttttgtagcccagttctctgttattctctcccatccagtttcagggtctagctccaattttccttaaccttgctccctcctcgcccataagtggagcccctaagactgatttgttggccattcacataggaggcaggtggactcagtaatccctgcgtgccagtgaggagacatgagtggagtgtgggtgtgtgtgaatgcatgtgcgcacacatgtgtatacatgtgcatacaggcaggcatgacaggtatgtgcactgtttgtggtttatttatacattgcatgtgtgaaagcrtgtgtttgctcacatgtgtgcatgtgtgtgcatgtatgtgtgcaygcatgtgtttgcaagtgcttctacacacgtgtgtgtttgagcacatgtatgcatgtgtatgagcttgtgtgtggtctgctgggaacaggaagggaggttggaacgagtcaaggaccatggtagtttctctgtgtatcctgcagtgacccacctcctacccgttccttctggttcagttggcctgagagcgatcctaaggtaacctctaagagtaaraagaaaagggttgaaagaggagggtaggcacagtggttttgggagccatttatttacagctttgctgtgtcatcctgagcatcttgctgcatcagtgattcaatcccaatcagaagagttggccacgatgtggctgagggtgtctgtgtgtgtgtgtgtgttttaaggaagattcttgtcacctgctccagctggacctcccctccagggcttcccgcttttggggctatccacagcttcaggtgggactgaggcacagttgggttaggtgtttaaagttcgggcctgggccttggggttcctgagcaggggagcagtggggaggagcctcagggctggctttccttgcagaggggctggctcagggggcctgtgagtcaggagagattatctgccagcccagagagctctgctaacttcctagcacgcacacctgcactgtggctgaggagtggaagaggagtgtgaaggaggtggatttatttccaaagctctgcttcctagaaggccaaggaggggagcgggcggagtattgttattgcgggactgacaggcatcaacagggtcactccccacccccacatgatccctggcagcacaaaaggatgctggatccagaactcctgagttctaggtctggcttggctacttattgttttgtgaccctggatcaaccacttccactccctgggactcagtgtcctcgggagttaatgagaggactgggtcaggggattgccaaggctcctcccagctgtgacattcaagggacaagaacactgttccttttgggagcccaagaggtggtggttctggttctggtttagaggcagtagttctgctggttctggttctggtttagaggcagtagttctgctggattttctgagcttaaccacccccaacactgccaccctggtgtgtttaagaggactggggaaagaccggctcctgggggcgccatcaaaccaagactgtggtctcagcagaagtcacaggatgggaagggagacagccaggtggtggcaggtctgtgagagagcaggggtagagtttccctgggacccaaagtggctctgtccccagccggcgcaggaggcctgacccctgggaattgcatgctccctgagctacatgtgacctgctcactctctttgcctttgaaacacttctgtgctattggtgacagggcttgagagtacctctgcttatcagattgcaggcytcagggacagaagaaacgggctggccctgagtggtggcctgtgagtcaggagaaggtgacactgtctggggtggaaggtcaaggaatgcctactcggtgcctggctctgtgccrgctcctgtgtgtgatgccatttagctctacrggaagcctgcagggaactgtcagtctctccttttttcagacgagtgtagaaaggtttaatgtcactaagaaaattgtctgaggtcacccacctaagtaagaacaaggggcaagtttcagtatctggtcgaaccctatataaggacaggggtggaggagagactggagggatagaaagtgaggtgaagcagcaggaaaccatctcctgggggcaagcctctcctgatgtgcacctcggctgagggtctgcgggtcacacgggactccagcagatgttgtctgtatttttctcagtttttattttttaaaatccctcaagatctccaaatttacaattcttccataaagagaacctctctgtttatgagaaatcaaccagtttcctggaggtataattggtttagtcaatttgtgcttaaagcacaagaaattccaaataataaaacccttaacagatggacctccagatttgccaaaacatcacttatagttttaaatgtatgctccataaggattcaccgtgcaatgccgttaatgttcttctgaggcatttagctgttattccatgataaaatgtggctttagcatggtttaggaccatatgtcacacagatctgatgacatttttttctagggttaccaggcagtgtggaaatgcacctgccctcatgcygggccccagagaggtaaacccactggcycagggctccctcttacctggaaatggaatatcccggcataaccagggccaaakctttggtcctgggggatgactctggccagtgctttttgattaagcgtaagggaggcgatgrcggctaatagccagcagtctcctgcaaaatggaagccataaatcacaattttcattgctatttcacagcaaataggaaaactctgtgtcagaaggggatgtggggagtttcagatgtggccacatcttttctacctgtttaaaaacagacaggacaccaacaaataactctctcctccccttctgcctcccttgcctgctcttctctgcccgtctatcataaacagctgttgccttcttggcactgttataggacatgcttacttgggtttcagacatatggctgcctgatgcatcagctctgtraattccagcaactccctttccagaggaccaagactgcatacatcagtgtcagcaygggctgggcgagcagacatttcatagctgccacccaagtggttcggcagtacttgggagggtggttagaaatctccctgcagccccaacccagacwcagcttaattacagataatggtatctccgtggtggctccatttgctttaaattatcttgcattttcaagatttattgactgacctactgaacttcccagctgtgtcttcatgttaacacacatctggaggaaaactaaaaagtgaagtcaaacatcaaacatgattttatctgtgctatctgtgctgttccagactcctggaggcattcctttgcccacactgagtgtgggctgtgtctggtgtgtgcctcacagtgtctcagatgccgcctgtgtaagcagatatctgggaggatccatttatccgaatcacctttatccagattcacttgttttcagtagacaacatcaacgtcatcagaacmtaaragcccatcacactcagcttggcagtttctgagttcacatttctggaaagcaccgtatgtcactgggcttgggacattgtaatatggccytttctggctgtttgacacaggcaagagagactcgccagggcygaacatcgggaaagctaattccgaatcgccctggttctggctttctgagaggtgtcaccagcagagtacaagccacccccagccttagctggagcacagaaggattggtttctaatgcatctgctggtctttgggagcctcaggtcagctttgggagatgctactaggaagtgacatggctggaacctgcaggatcgtttgttcagcaaactttaccaagtgcctctagggtggcagaccttgtgccacgcagaagatgcaaagataaggagagacttggtgtctgctttcagcttcagggcggccaggccaacaggagtctaatagagtgacctctgctgtgggctgacctttcccagctctcctccaagtttcaactttgcccagttgaggaaaatgagtgttttccggcctgagaactcaacacctcacgtgttttcagccagaaatgctctgagcttttggcggggagattgagaagccaaaacaagattgcttttctctctcttgggcctgggcagatggatggggctggccacccagctgtgcctggaagaagtgccctctgtgggtcagcgtgttgctcggctatctgggtggtgcagagcagagggcactatgggaggagcaggctggagtgaagtggcaccatctcggctcactgcagggggaacgctgtgcctcttgggttctcagggaccccatactgcagtcgctcttgatccagcaatccaacctccctctcgccatgctccatcccctcacactcacccagctccacccctacccccaccccctgcagataacagcatgccttgatgctgttccaagtgtgttctagttttttttttttttttgatagagatgtggtcttgctatgttgcccaggctagtctaaaactcctgggctcaagagatcttcccacctccccctcccaaagcgctgygattacaggtgtgagcactctacatgaccagatgttctagttcttattgtgggtggcaacagatcacggctgttcattttcttgttattctttataacatatatatgccatgtacagtactttggtgtagtaaaagtgttacaaaataatctttagaatcaaccatccactaaggtaaaatataaggttgtaactccaaatatatgtttatgccaatgtgacaaaccaaaactttgaaaaacaaaggagccagtagaatgatttcctattggatagcaatggaggactacggggtcgaggggaagggaggcagaggaagagggggasaggtgggcagcggcagggaggatctcctggagaaggaccacctgaatgtaaaccttttgaaaagtctacattgtatctagaatatggcatacatgggggattggttccaggacccctgtgtataccaaaatctgtgcatactcaagtcccacagtaagccctgtggaatctgcctataccaagtcagccctctgtatatgcgggtttcaaatcctggaatagtatattttctccyttccttccttccttccttccttccttccttccttccttccttccttccttccttccatcctccctccctcccttcctccctctctcccttccttctttccttcctttttttcctttttgtttgtttgagacagtgtcttactctgttgtccaggctggagtgcagtggcatgatctcagctcactgcagcctcaacttcccaggctcaagcaatcctcccatctcagcctaccaagtagctggaactatggtcatgcaccaccaagcctggctaatttttcaattttaatttttagtagaggcgagccctcactatgttgcccagactggtcttgaactcctcggctcaagcgattctcctgcctcggcctcccaaagtgctgggattacaagtgtgagccatcacgctcagcctggaacacggtattttctgtctgtgtttggttgaaaaaaaatccacttagaagtggtcctgcactgttcaaactcatgttgttaaagggtcaactgtaattccgtctatcatccatcatctatctatacccatccatccatgtatttacccacctaccttcctatcattatttactaccatctatctattattatatatttattttgtatggtctatcagtcaatcaatcaacctatcaacctatttatctatctaattatgcatccgttttctacctatcatctattacttattatctatgtttctatctatctatccatttgcttctctctctctctctctctctcaattgtctctctgtctagctaattaactaacatcagtctaggtttgtgactttggatcttgtgtttaggatagctcagttgctcagcatggaggttccagcatggcctttcttaaccaatagaccacagtgacaacctcagctagaaataagtcagggtccacacaagcttgcagtggtttgttctctaggctgatttcactggtattttttaaaagaaagtctctcgctctctcactytctctgtctttcatagatagaacaaaggtaaacccagcccagttggattaagtcctaaaatgcaggacccaatttgagtgacttgaggtgcactcaggttcattgcaggagggagactggattgctggggagcggctccccagggtgtgtataatggttagcagtaagggctctgctgctggagtgtctgggttcaaatcctgattgcctgtctaccacctctgtgaccttggacaagttacttagccttcctcagcctccatttcctcatctgtgacgttaggagggtgggttgtgaagatggaatgaggcaatgtgtgctggggagagtacctcgcaggtgactgagttcatgtgtgcaggtgttagctactgtggtggtgtaggagagcccgaccaacgctgctgggtgtcactttcctctgtaaactccggggctgtgagccccacatcacaggcatgtctgactctagaggaacrgaggtgcaggggcttgaggccactggactccattcagagggagtgaggaagcagaggccraagcagtgttgttcccccagccccrtgcctcttgggtcctcagggaccccatgctgcagttgcttgcctgtcccagtgactcaacctccctytygccatgctccatccacttacactcacccagctctccctggcagatatcagtcctggtggcccctccaagaatgaattctgggtttttcacgatttcctggaggaatgagagtgttattaggctgaggcctgccatgctgcaagccactatgaaagggtaggctcagggtctctctgctttcttggggcagagggctttccctgtgcttgattcttttccctgaggagggccacgtggatgtaaaaggctgccacctctctatgctctggataaggctgggctcatctttggtaaatctcctccgccggggagaggtcctgcctcctgagctgcactcagcaccaatctctggccagaaacacaggccacacccggccacaaagctggacatcagccacacactgaggattcctgtgctcactcaggcactgggctaggagtccagggctatcccagctgtgagctctgtgacctctgtgggcttcaaggagctgagtaatgcatgtaccacaggctggggccttggactaaacatactccctacccacccagcttctccatttctttctttatataatccttcccccacaaagtggattccaaatatatataggtttagagacagaatcttgctgtgtcacccaggctggagtgcagtgacatgatcatagctcactacagccttgaccttctgggctcaagcaatcctyccacctcagcctcccaagtaactgggactacagacgtgagtcaccacgcccagccactttttaatttttttttttttttttgtggagatgggggtctcgctatgttgcccaggctggtctcaaactcctggcctcaagtgatcctcccgccttggattcccaaggtattgaggttacagacacatgccaccctgctcagtgtttctttttacagagatgcacttaggtaaaatttcatgtatctataccatataaagagagatatgcacacatctctcatattgtttcaccgaagtgcattatatatatatattattctatattacacataagcacatacactatgtgtattaatgtaatcattaatacatattaatatatacatatacaatatggaggggtatttataaaacatgaacaaaaaagtgtagaaagcaatcttatgatatgcatatattcttccactctttgagttgctgggctccattcctgacattggacgacaacaaagagagagggaaagcccctgccctggtggagctgccctggacgcggagggcggtgctctcggaagccccgccccttcccagcctcctgccccgcccctcccccagcctgcctcagccctggcctcacccacggcgcccactgtgcctgcagctgccaccacctcccagaagctgttgtttcgttcaggagagttttgcaaattgcatttgaggaagagacaaaccataaaccaggagagaaaagagcgaggatggagagggaaggggtgggatggggcaaggstagctacagcagtcagcaggggaggcgtctctgggggaagcagaggagcacagacctaaacaaagggagggagggagggagggagggagraagccgggccggtcycgggagaggtaacagccaawcctgtggcagcgaggcacgttctggctcaccctgcaggggtggtgagttaactgggccggggcctgcagaggagtgaaggatttttcccacctcttcccacttttccaggcaccaggactgaggaggggcctgggctggaggtggaaggttccagcagtgtctgggcggacgccaygtggggagctcaagctgcgccgccttccccgagagacctctgctttgaattgtcttcctcaggcttctcagcaccctgcttctcctctcatcttgtgtcccaaagaatcaaaggcaggacagagatttctttgaagtcaaggggattatcaggaccaagagcagaagcttcaaatgctggtgctctctctgcattccccaggatgtgacaacctggaggagtgacagacaccaggggcgcctgcccagggagagctatgtgtggcattagtgtctaaaatactcaagaaagcttggccaggagaattkctgaagaacacggggtgtttttagatgcgccaaaaccccaggcccggcagaagtaaggacctcccaaatgctggcctgtcctctgccaggtctcacacgtctttgcattcccacccccagctccaggtagctttggcgccatttcattaaatgactctgatctccgtggtggctggaaagggagtgaaggtggggggcagctgctcagttctggggtcctggcttggcttgcctgtgcggacccctctcatctgtaggaagcacactgctcttcttcctcctccaccttggctagcgcaggagtttgcaggtggctctgagctgagcccagaaggacaatgcaaaccaggaccatgtcagtgggcctcaatagagtcccaggaatagcctgcccsgctcagcagtagggttcagggtgggccatttaacttctcacggctgcatcctcatctgtcaccagcttagacattctgggcttgytgcagaatgtgcctgcccgaagggaaacccaggagtcccccaagccctccctgtcttgattgcccagcccctgccaggggatagccmtggcaagcaatgcccccactgccaatgctactcactcctcaagtggacataaaatgtactccaaaagccacagatccctgcccagcaggctgtgctagctcctggggcagggctgttcccggatgcccgcctccttcccatcctccctgcccctcccctcccccagccttctgcaggcctggccccgccaaccgtaccaactgtgcctgcagctgccaccgcctcccagctcctatcttgcaattggttgttttgttcaggagaggtctgtttttgtttttgttttaaaccaratcgcacccaatgaggagaaaaatacaaaaggaaaaaactcagaaactctccaagtaaacacaaattagccatcgggtataaattggggaggtgtctggatgtgtgaccgactcctctgtgggtcagtgyttctggkaattggtgtgcacacgtgccagtcacagggggttctgcggacgcatgtgtggaaggggcagctaggcggtgggcctgggttagatgcctgggagtggtgtgtatgctgacggcccacatgcccacatgtgcaaggtgcctgtgacttgccttgttgtgtgtgcccaggtgtggtacacgtgtgtgcttgtgcatgctccacatgtatgctggttgcatgtgcacttgggagcattgtctacgtgtgagtgtcctgcatgtgcgtgtcgatcctggatgtacatttgttcctgtgaaatgttgcttgggaggccatgaggaaggggttacctgaagctacagtcctgtgataggacgatcagaggtgtctcaattgcaggggtcttgacaaacctgaagtgaacctagactgctgcctgaagccccgagggaggcacgcagacccctccccctccccctcccctcccccaccccacagccctaccaccaggtggttttcctggagcactaagggccaagcaccctggaatgtttgctttcagggactgttctgtttaccttgtacatcatcggggctcagccgaagacacactttcctctactaagcacagtgaataattcacaaagggaaaagccacccttctttctttctctttctttctttctttctttctttctttctttctttctttctttctttctttctttctttgtttctttcttctttctttctttctcttcttcctttctttttttctatctttctttctctttctctccttccttccttctttccttccttcctcccttcctcccttcccttccttccctttccctctctctcttcctctccttctctctttttctctttctttctctctttctttttcattcattctgtctttcacatggccttccagtgaagaaaagccacatttccagcaaggtctggagatgccagacgctgctgttcatagctatgtgccgatccctgtcatgtgcccagcactgtggaggccatggggcctttggggctgtcccagaacaactgacaacccctcctgggggtcaggggagcagcacagggaacggcaagctcaccgtgcaggagaggctgtggtcacatgccacgctgtgcacaggtctgccacaggggttgttcacatgggctagaggggtgtgggcactttcggggaggtgtcctggatttacactgagaattggtgggggggaattgcctggccaaaaataaatgggtacaggcagacaaggagggatggactgcatggtggctgttccccatcaggctgggagacctcacccgatactccctcctcctctttctgtgcacccacttccactcaggtccacagtcccttgcatgagacctgggggtgatctcaccttctctccaggttgagcctatcaccctctctgcctcccagcccctcccagccagttccctgagtcaccctcagtgcactccttgccctgggctcccttgagggcaagcctggctgtccactgccctccaatgtccccttggctttgtgctctgcccaccctccccaagyacagctgtgtttgacaagaaggtggtgctgaggaggagggccgtccagccccacggtcccacgggctgctgagaygtgcaccgtgtaatgctgagtccyactgcaaatgatgcccaagccacagaggtctgcagggaacctggcaatgcttgtgatttccctatggcccgctaccccccggctccctgcgactctatgctgcaaaaagagtctccatgctcatcctcagcccttttgttcctgattttacagaaatctgtaagatatgatgtaaagctcctaactcccctaaataagaaacagataggggtacgrgaatgaggaccagaccaaagggacaatcttcagttgcagacaaaggaaaaggcagaacagattctgaaaatgagtctgtgggaacgacagcaacacagtagacctgggttaagatcaataaagggtctgccgtaggtggagacagtgggatgaagaagggacagagggctggtacaggggcatgggctgggtggcaggtcggggtgcatcttggcaggggcttgtgtgtatcaagggccctggcctgtggatgaaggcctcacccagcgtttggggcaatgccagaggagataatactaaggaagacagccccttggagcagagatctgggactctagagtcgctgggsaggccttggtggccctggtcccaggagggragacttctgaagggggagacaaagatgccctccatgctggtttgtgcgtccagcttttatctyggagaattctaactttgacaaaaagtaagtgagttgtagagtacagattacactttaaactagatgatgtcaatatagactgcaaggatgggggccctcctagagtcaggagacgatggtgttaggttacaatgacagcagtagaaataacaaggaccagcactgattctttacacaccaggctctttgctaagtgctctactcatggtaacgcagctgaccctcatgaggaccccataagttgcattattgtccccattttaaggaagagaaaaagtgcttccaaccttttcatatcaagtgcctgtagagaacatgagcatctgtatgaaaccctggatcaaacagaaagagccgctgcttctggccaggggctctgctcaccaggggcccaggaaatcaatttctctaactctatttcccagggctcctgacatcaactgcagggaaatctctgcccacagttaaaaatgcacccacagcctgcagcctgggcagctgcccacgcgcccatttgttcatgcgccgaggccggaaataagcccagggagacctaatggtcgtgggcggtgcccctcagagggtcactcttttatgtcttgtaacttctgcttttttagtttggaaatgtcctttttcttacttagcagagcatgacctactaatcctgtctgtaaagtgcaaccccacgtgatctgccagtgccgtgacctcacactgcaattggccatatgcagagaaccaaaaacaatcacagcgtggcttcggtgaggaaggtgcctgggagctttcaccccaactccgatagggccactgaatgctcactgtgatttccccatgaacatggcaccttgtgggatcaattacctggcaggtgaagatcaaagcacctgtgtgcctatgcatgcagtcacccaccccccacatacacgcctatgcatatccacacacatgtgcacacagtcacacacatgcacatacacagtcaaattcctacacacacaagtgcgtgcacacacatacaccccacactgcctactgcaggaaatagcaataaaacccttaccacttcggaaacacccacttaggttcactttggccctgcccctgaagagcccagaagttttgtgaatgtgcgttaaaaaaaattgtttttaatcatcaacattattttaatgttgggagatagtgaggaggtagttatgatgagtcctttgctactcatatgtaagatgagactcagagctaataatcattgtaatgatgataataatagtatcagtaatagtaataatgtgacaatagctgtaatgtactggaaaccttctgtgtgctagacattggcctgcrttagccattattgttcccattttacaggtgaggagactgaggctcagggaaatgaagtgatatgactatatgcatgagacaaattgtcaggataagacrggcactcaggatctcacttgtaggaccagcatcccttgtactgcccctccttgcccaaaagcaaccggaccccacaggagccactcccaggcccgtacmcacctggagggaatggaagccagcccagctggcgccgggtcagaggtagagccctgactaatccagcaccgcaaatattgacatggcgtcccaggcacaagctagcacctcttgggacccagtgaccagctggtgcctcttgggacgacacctccagactgtcagaggtggggcactgttcaccctgatctctgggaatggggggtgcatggttctygggagaagattcctgcttcccttgtattccatctgtcacccggttgctgagaccttgctgagccaaacatccatccacactgagcaccctcagctctgggccagaagccacagaacactgtgcataacgtgatctcagtgttaccacacacagggtgggggcctgtccttgtggataaggttttgattcgtgcctatcacctgctgacaagacccactctgactccaggtcctcagcctcggtrggagtcagacagcttggagccggggagcgggtacaaccagatgccccsggtccccaccgcagagcatcccaggcctgtacattattttctgcctccaaactgcaaagctttccacggtagactgggatgatgcamctcagttgcactgagcgtagccggcccctccccagcacccctgtttccacttcctgcgggggctgctgarcctcggcctcatctrtgctccttcccctgctcrccccactcacccctggtcgtttccacacaaaggggatctgcggcctctcactgtagaacagggaggaattgctggctgggaagtctgcatcctcaaacagggtgcctctctgcaggcactcctgcctcatttgctcaaagctctggcctgaggagtgggtgatccgggcgtccttgggaaccgggtgtgcctgaggccctggggcccggtagaggtaaggcatggctgctccctggaaggctggcttgggtccggcagtggatggaaaagaaagtgaagaagcgagctgtgtgtgccggtcaagaaggaacagctcagagggccactgggctgagtggccctcacctccacctattttctgggcacctccctgttagactgagatgggacacrccctgatggaaaacagcagagagagccctctgcccactctgcactcctgcagactcagaggcagctctggggcctggcacattccactcagaggcggcacctctgcttagtgcgctcagggggcctmatgggagagagaggattgcttcagaaggaaaaggagcaagaaacccaastggtccaggaggtggctttacggagaagtgcacggtgtggycttgagtcccatctcctgcatcagagaatggcagagttttgtagtcggaagggagsttggtgaatgaaagcaggatgcattatgtgaacacagctggcacagctcctgcacaggcaatcccatagtgattcagcactggggtcagcaaaccttttctgtaaaggcccagaccatgaatattttcagctttgtgggccacgcaaagtctgtgctgcaactactcaacttwgctgttgtagtgacaaagcagccgtagatgtgacacagatgaatgggtgtggctgtgttccaataaaactttatttacaaaggcaggtgggggttagatttcatccaacctgacccctgatagaggagaactcacagaggacatcggctcttcctctagggcacatgtgcctctttcrttctctagacatcatattaataaagttccttgttgttatagtcctacaaataggatctcacgtctgagaaaaaacaaatgttagaggatggaggtggtttgataaatgtgtttgcccatagaaatgattatacaggctgggtgtggtggctcacacctgtaatcccagcactttgggaggccgaggagggttgatcacccraggtcaggagatcaagaccagtctggccaacatcatgaaaccctgtctctactaaaaatacaaaaaattagcccggtgtggtggcggatgcttgtaatcccagctacttgggaggctgaggcaggagaatcccttgaacctgggaggtggaggttgcagtgaactgaggtcgtgccactgccctctagcctgggtgacagagagagactctgtcaaaaaaaaaaaaaaaaaaaaagaaaaaagagagagagagagaaagaaaagagagagagagaaggaaagaagaaaagaaatgataaatactggaggggatagatagcctaaataccccaactcgatatcacacattctgcacatgtaacaaaatagcacatgtaccccatcaatacrtacaaatattatgtatcaataaaaataagtcaataaaagtattagtcaccacgtgaaaactctgatgttctaagcactttataatgatttctgtgtgattctctaactagtcaaagttgaggtttggagacaaggggtcttgagttaatgggtacagttaaaaggccatgatgtgaatttttatataagctcacagttcccaggagtgtgcactcagtctgacacacgttctgtctagtagatcctgcatatggttttacaggggaggtctagacattagagttggggatatttgggttttactctgctatggcctgattgcttgtattccgcaccacccccccgaccccgccaaaatttgtatgttgaacccataccctgcaaggtaatggtattagaaagtggggcctctaaggggtgattaggtcagaagagtggagccctcatgaatgggattggtgtcattatgaaagattaggtcacagagggccccctcctcccttccaccatgtgaggacacaggaaccagaaagtagaccctcaccaggcatggaatctgccagtgccttgatcttggacttccagcttccagaactgtgagcaacacatttctgttgtttataagccaccctgtctgtgctgttttgttatagaagcctgaatgaactaagacaaattcccagttttccctggggtgatcttgggcgagttatccatgctgtctgtccctgcttccaagctgtgaatcaggataatcggtgctgcctgctagaggcatggcgggtttgtggaarcaaagccacttgcaaagtctggcacatggaggggatcaggagctgctgattcctccctttcccctatcctctctgcaccccctgcccctcccacagatgctgctgaatttcatggtctccttctgagcctgacttgcctcaamttgcaaggcatctcttttgtctctttgtttgcacaatgaaggactttggaactggggtcctctggctgggaccagagtgcagttctggccagtccaaatgattcttggctagagatgatggagctgcccaggagtgtcccattgcccactgccctggcagacggctctgtttcgaagtgattaaggagggcaacctagggagacaggtgtggcaatgtgagggccatccatttctggtgacacctcggcagggaaatgattaccagcccagatctctgggagcatccccttcaaatgccccagcaactgagaaaggaccttgaagtaaatttcagcactgaccagaactgtaaagggtttgctcagcaccagacccactcccagcttcagggatttacgttctcattctcctcccgatacaaacacctctccaggctggggtcttgtccttccacctgggacttatctatgtattggaagaacctgcctttttctttagagtcttagtatagttgctaggtaattggagaattgcatcatcattgtgagtaaaacaaacatgcctcagagtaggaaacacaccaaaaaggtttaacaatcctccagaaccacagctggaattcctcctgccccctaacactctgggactctgagaatgtctgcgggagggagtgcattctcaggatttacagcctcatcattcttcctgcccaatgtctgcccacagagccctgggtccatctttcctgcagagctcatggcaccggacttctccatgactttgtcttagcgtctaatcctgctcccagctcagcccagtgcagggcaggagcacgatgcacatttgctgagtaaacattgaaccaatgcctcaagaaagcagatggcattcttgggtgtcttcatttagttttccaaaccttcacttctcaggatgaacaatagttacagaaactgcagccatgcagtctaaggtctaccaggccttgcacacttcctcacccacactgggaaatgccctgagtggctcagagggaaagggctctgagcttgggcagagaatcatgtgcactgtttttaataagctctgccagcttgtcgctagcctagagatgcaatcagctttgagccaagcgggggccatgcatcatgttaagtgtattttcttctctttagcagagcaatctgctgaagtgatttctacatgaaatgaacctgacctggcatctggggccttcctggcctctcttttctgtgctgttctttctctgtctcctccacactcaggcctstggcgaactccctttgtttctcttcttcttgttcatcttgaagggcagcaggaggtgaacatagtgcctgsgtggctctgggatgccatggggcaaaaccccaaggacaaatgctcrgaagcttcacatgggtgcagggagatgacctctaggaccccacccggtccaggccttacagcagggcctgggttttgagggatatgccaaacagcctggatcctgcagagggatctcagccctatgatgggctgagagtgagcccacccggctgcgacatttgtagccccttggcttgcagtgtggaggatggggtgggctggcgaggagggtggagagtggagaggcaggggacctgcacaggtgtccaggtgagaggggctgaggctaactccagatgtaaccagagtgaaggcaggaagggacagattcttctagaagtactgtcagggcgttctgctggggtgcaagggtggaggtgtaaaggtggcgtcctgccttcagacttgagcaaatgggtgatggtggtgacagaaggaggagaggcagacttggaagaaaagttgaacactttgggtatgttaagagtaagacgactgcgtgcaatggctcacacctgtaatcccagcactttgggaggctgagacagatgggtcacctgaagtcaggagttcaagaccagcctggccaacatggtaaaaccttgactctactaaaaatacaaaaaatgagtcaggcgtggtgggggtgcctgtaatcccagctacttgggaggctgaggcaggagaattgcttgaacccgggagtcagaggctgcagtgagccgagatcsagccacggcactccagcctgggcgaggagcgagactccatctcaaaaagaaaaagtaaaacacccccctacttgctgaagggagtgtaaattggtgtctcctttttggagaactatttatgaatacctctcagagctaccaatgcacccactctgatccagctgtttcccttctagaaatttatctttatcctgatgatagagccgcaccccgaaaagtgaaaggtataccagcttgytcatttcatggtggcattgtttacattaaaaaaggttggaaagcacttagtgccctctgttgggggaatggtraagaaaattatggtccagctaatcatgaagtggaacagtgtacagccataaaacggaacaaggaaactctgcatacactgatgtgggaaggtccctgggatacagtgttcaactgaaaagtcaaagtggccgggtgcagtggctcacgcctgtaatcccagcactttgggaggctaaggcaggcggatcatgaggtcaggagttcaagaccagccttgccaacatagtgaaaccctgtctctattagaaatacagaaaattagccaggcatagtggtgggcacctgtaatcccagctacttgggaggcagaggtaggagaattgcttgaacccgggaggtggaggttgcagtgagccgagatggtgctactgcactccagcctgggtgacagtgcgagactctgtctcaaaaagaaaaagaaaaaagaaaattcaaagtgcagaatggcatgtagagtatgccagcatttgtggagaaagaaggcaaaaaatatttatttatatctgcataaaaatttctcggaaactacacaaagatctactcataatagtggttctgttttctgggggtaggtggagtagatgggggtagaggaatgtggggagacttttctatatgccttttatatttttttagctttaaccctatagatttacctggttgaattttttaaaattttattttagagtcggagtcttgctctgtcactcaggctggagtgcagtgacatgatcatagctcactgaaggcttgaactcctgggctcaagagatcctcctacctcagcctccccagtggctgggactacaggtgtacaccacaacactagccttaactgttgtcgacttttaaaagcctagtttgaaacttaaagcccacaatgatgttttggcctaggtgggctctgccttccctcccccgtgtatctctcctcgcaagatgtctgtacatttgcaaaggagcttatctgtcctgagggccacccccatttcctagaagatgagaactagatcttcacccagaccttgcttccctatccatcccctcccaaggtcattggtaagcctgacatcaggtgagggtctcmctttcttcatccagggacttgtccatccctggaacactcctagtttcacccctgtcctagtgggcactcattcatgaaccataacaaatcttttcttcagtgggaatgagccgtgctcaggcatcacaccatagggtaagagccatctcctgaaaggcaacagagcacccagcccaaatctcccccacactcgctgctccacagggtgatgccagtctttggcctcagctgtctgactcaagagatcccagcttgtaggcgcataggctcgtggacgacctggtggttcccctggtttcccagggctgcacaagctgcctatagcttctctcagctctggccttgctttctggcttgattgtggaatatagtttcctccaaggcctaatctccctaagtaagctctagatcactgcccctatggcctaaggtgacaccgttgaaattgtacttccgtccctgagaagtagtttcactccttaaacattcattgttgaagaatgataaatatacctgtctgccttctgctaactctctgggatttctttccctggagtttgacctcagcccaagacgatttcctttctccttctcatctasgagctggaggttgatgctatgcacagatcttaggatgacttgaatcacaggtgcagcaggataggaatttactctccgcagtttagggcccaaaaaaatcctaatttttgagacagagtctcctctgttgccaggctagagtgcagtggtgcgatcttggctcaccgtaacccacctcccgggttcaagctattctcctgcctcagcctcccaagtagctaggactacaggcgtgtgccaccacatccagctaatttttgtatttttagtagagatggggtttcaccatgttggccaggatggtcttgatctcttgacctcatgatccactcacctcagcctcccaaagtgctgggattacaggcgtgagccaccgcatctggccaaaaatcctaattaaaaaaaatattatctcttcttgccctctggagtccccagttaccacctcgcaccaaaacttgtatttagattttgttgtgtgacactcttattcattttaaaatggtctctcttactctatctctcttcttctgtctctgtaaactagcagttacttcaaagttcaaatatcctgtaaggtttgtcagaggtgtttgagccagaatgtctccaacttgaataggggttgggtaaaataaggctgagacctcctggctgctttcccaggaggttaggcgttcttagtcacaggatgacataggaggtcggcaggtcacaaagatacaggtcacaaagaacccactgataaataaaacaagatgcagtaaagaagctgccaaaacccactaaaaccaagatggcgatgaaagtgacctctgttcgtcctcactgctcattatacactaattataatacattagcatactaaaagacactcccacctgcatcatgacagtttacaaatgccatggcaatgtcaggaagtcatcctctatagtctaaaaaggagaggaagccttgtttcagggaagcctctgcccctttcctggtaaactcatgaataatccaccctttgtttagcatatgaccaagaaataaccctaagtatactcagttgagcagcccatactgctgctctacctacggagtggccattctttctttacgtctttataaacttgctttcgatctatagactcgtcctgaattcttycttgcgtgaggtccaagaaccctctcctggggtctggatcaggacccctttccagtaacaggtccacttttccccaaataagtgatcttcctcctccttcctccttctgatagtggcatctaggtcagggtgaatcttaccaaacctgccactggagcagggacctctggctctctgggatcttcttggttgaggtgtctctgggaaccagcttctttccttacggtatttgctgtggaggggtcacagctagcataacttgtgtttcattttcctatcgggggcaatgcaccgtaattaccccggaagctcagcctggctccaacatttcccgttaatgatgagccctccacctggtttctctgtgcttgccgaacctcagaaactcatttgctcttctcagtggtccccagctttgggctctcagctctgcagactctgccacaccatctcatgccctgctcagggcaacaccctggtggacaaggtgactcttaattcccagccaccccccgccccatagtggaaattgtgattggacatttattattattattttattttagagacactgctggagtgcagtggcatgatcatagctcactgtggcttccaactcctgggctccagccatccttctgcctcagcctcctgagcagctgggactatagtcatacccagctaattaaaaaaaaaaaaaaacctgtagaggagggagtctcagtatgttgcccacactggtcttgaactcctagcttcawatgattctcctgccttggcctcccaaagtgctggggttacagatgtgagccactgcacctggccttattatgtttaattggagggaacattgataaagtctgttacatagtagcaagagtatccctaacatgccttaccactgagaaataagattctttgctgctggaggtgtgtgaagtttttctatagcagaaggagatgtaatttttttaaaagtcctttgactacagagatttttatattgtctgtgtacaatattactgggtttattaaaataatttaatttaaaatatctcatttgatttatcacctacatctacagttgtgtatttagttatgggacatacatctaattgaattcccatctttttgtggtaaaggtttattttcagcatctctttatgcatctcatcctttcccactctccattttctctttttaatgcaccattttctgattcttataaatgacgtatcctccccctttggcaaggtagcattagccagcaagcatacctaatatttgtgtggatggaaggctcaggaagagaactatttgtctctttcgagcttatggctttcacaaagtgtcatagcaatttttatgactcaactttcaaaagagatttattagcttgggtctctaggaaaaaataatttataaggccactgacaatcatagctgtgaagacataaagtaacatgataagcacttatttttatagcactttttacatatgagactaccatggtatgaagttcaattatgatgactgatttataaacatcatttcttgtttaacgtgggtaatttttaaaagtatgaactggtgagaatgtcaaatggtgcagccaatttggaaaagtgtgacaggtcctcaaacaactagacatagagttactgtaggagccagcagtttcactcctgggtatctgtcaagagaactgaaaacagatgtccacacaaaacttattcatgaatgcttacaacagccttattcataacagccagaaggtgcaagcaactaattgtccatcagctgatgaatggataaataatgtgtggtatatccacgtagtggaacattattcagccataaaaaggaatgaagtactaatgctacaccttggatgaaccttgaaaacattacgctaactgaaagaagcaagtcacaaaggacaacagactatggaaatctatggagacaggaagtcattagtggttgcttagggctggggatggggtgaagtgggaggggtgggggtgatggctaaaggctttctttttgagatgatgaaatcttctaaaattgactgtggtggtggttgcacaactctaaatatgctaaaaatcattgaattgtacactttaaataggtgaattgtatgtacagtatmtgaattacatctcaaagctatcttaaaaagataaataagctctgtgcctcattttgcctcctacagtgtttcgtaaagttgtagtactaaaagggagatttgatagcaataatgataataataataaacaggctgggcgcagtggctcaagcctgtaatctcagcactttgggaggctgaggcaggtggatcacctcaggtcaggagttcaagaccagcctggccaacatggtaaaaccccatctctactaaaaatacaaaaattagccaggtgtggtggtgggcacctgtattctcagctactcaggaagctggggccagggaatcgcttgaacctgggaggcagaggttgcagtgagctgagatcacatcatggcactccagtcttggtgacaaaagtgaaactccatctcaaaataataataataataataaacaatttctaagtattattcttagyagtcacctacgcatggcactttgtgcagatgactcctgcatgtgtcagggtttttcttgcgggcaatgcagtctgatcagtataaactaggcagagaggtatttgatgaagggtttggggaactcagaaaatggactgggaagctaagaaccaggcatggaaatgagcaagaactaggggagattggggagcaggagcagaaatggtcttgcaccagggtcagaaatgcctgtggttgaaagtcagctgtcttcagcgttcaaacctctgtgctccagattccagctccagggtggttggcttagtgggtacctgcctctcagcccaaggagaacagagctttcgattcacagagcttccgattcacagaatttccagcctccactcaagaacaacagggatccaggtgctgaaaagggatagatgcctcccacagactccagggaagcattcagttgtgaccacctctacccttttaagggatcgaagcccagcctagcaggaaactgagctttggggctttgaaattttgccccaaagtgctgctagaagaattggattagataggataccaccatgtcactgactacttagggggaaaagaaagctgaggtagtgaaaacatttaatgaaatcctgaacacccagagtaacctatttcttccttgctccgttcccatttatatctgagaactgtgttcatgccccagatgttgcaagaatactgcggaaacaaaagtgttcgaaataattcttttttttcgagatggagtctcgctctgtcacccaggctggagtgcagtggagtgatctcaactcactgcaagctctgcctcctgggttcacgccattctcctgcctcagcctcctgagtagctgggactacaggtgcccgccaccatgcccggctttttgtatttttagtagagatggggtttcaccgtgttagccaggatggtctcaatctcccgacctcatgatctgcccacctcagcctcccaaagtgctgggattacaggtgtgagccaccgcgcccagctgaaataattcttatgctcaggatcaaaatgataaggggtcaattgtattaaacacacacacacacacacacacacaaactttgccttaaacataaatgtgtttcagaagcttggaagcagaaaataattttaggagctgagtattattaatcagcctatgtgttttcaactgcaccaagaaatatagcaaagatatgcaaactctttggatttaagacatcacctttgtgttttgacactctttcccaaaccccgcctaaatgacaggtgggactgttttcttttaaacagtaaaggcagggtcctgagaagacacttgaatggggcaattggaggagtgtttaatcgatgaactatttacaaagatgtgggcaggaagaccatgatagactgagcagttggggggctggaagcagcagggtacccctagaatctacagctctgagggggtgaaggagaagcagtttcaggaaggagggcgggatgggagctgatgggggaggatgcagtcacctgaggccaacctaaggggaaggagaagctgtggagtggaagccagggaaggaagggagccctgtgacaccatctgtgtaatcagcctcccaggaggtggagcagggtgacaagtgcactccgagggaggggccaccaggtgagtcagcccagggcccagctgctaagaccaggggcaggcctcctccaagtggggttgggcaggggggcaaaggagaacaaaaaagccactttacctacttctgtattgagtttttaaaaaagactgtattaatttacattgtaattttaaaataaaaatgtaaaaatattaaacatgactcggaaatcattgagtttgaggatctcatgagaagttgatgacccttcttgaggtaactaacgacactttggaaggtgaaaccaggttgctcgcccactctaagaaggagcgagaaggaagaaggagaaacagcactgtgcccccttctcccgctgcagtcggggcgagatttccatgctctgggaggtagtggaaggaagcgttcagtgaggcccttaaagacaatggccctgccagccagttgtgatgttgacaatgttctcctgcaggagggcgggaggcctataaagtaccaagcgcagtcctccatgagcaacggggaggcgatgagcgaccctctcctccagggatagacacagaccctctcctccagggataaacacagccagttatggccgggcgcgatggctcacatctgtaatcccagcactttgggaggccaaggtgggcagatcacgaggtcaggagatcgagaccatcctggccaacatggtgaaaccctgtctctactaaacatacaaaaaaaaaagttagccaggcgtggtggcaggcgcctgtagtcccagctacttgggaggctgaggcaggagagtggcatgaacccgggaggtggagcttgcagtgagccgagattgcaccactgcactccagcctgggcgacagagcgagactccatctcaaaaaaaagaaaaacaaaaaaaccagccagttatatttaccagctattaattaaatttttcactggaagcagtcttgccttgtacatagggatgaaacacacacacacacacacamatacacacaccatatatatatttataaatgcatatataaaaattatggtaaaatacatgtaacataaaatttacaaccttaaccatttctaagtgctcagttcattggcatcaagtatatttgcattgttgtggactcatcacaccatccatctccacaattctttttatcttccccaactgaaattctgtgcccattaagcaaaatctccccattctcccctcccccagcccctggaaaccaccattctattttccgtctctatgaatctgactattctaagaacctcgtaaaagtggaatcatatagcatttgtcttgttgtgactggtttatgttacttagcataatgtcttcaaggtccatccatgatrtagcatatgtcagaatgtcctttctattttgcttgaataatattccatcgtatggatatgtcatattttgtctttctatttatctgttggtggacacttgagttgcattcaccttttgtaaatataacacatacacaatgacacacaaactccagtatgtgccagggacccgcacttgttaaagggtcatctataaaagagaaagagaaaatacatgtgccaacctaagtgagaagatgagaagcttcaagaagcttgagttgggcttctgtgcatcacaaaggtggagcctggactgtcatctgggcccggcctcttgggtagtggtccctgaatgactggcagaacaagaacatgaaatggtctccacgcagaagacagccacgtggaagtggctgactggtagaccagctgagatgaagactactccagtcttcacagcggtgctcaaatggccccatcaaatcaaatgtaatgaccaggcagagactagggtgaaaacagttgtggaaatccatttgtatgtctcctgtaatatatgattggattagctcatcccaactcaatgaacttcattgccaagttctccagaggaaaagtctgtccttctagtgccttctgttttcacacaataagcaaggatgacattttggcgtgacttgttaaattgtagcaaatgagacaactgtcagggtgtagacaaaggcaaacaaatcacttagtgatttgtcgagtgaaaatcgacctcaactaaaggcgctcactggagtctccttgtggcatttctcatgggcacttgctttcataagcatcgccctttgatgttattttgctaggagaatgtggaaaagtgtatttggaaacactgagtttcagagctgatagtaatgctgtatcatttcaatcagaaaggaattttgcaaaaaggaactgacttttttgtttgtttgtttttgagayggagtttagatcttgttgcccacgctggagtgcaatggcgcaatctcggctcactgcaacctctgcctcccaggtttaagtgattctcctgcctcagcctcctgagtagctgggattacaggcatgcgccaccatgcctggctaattttttgtatctttagtagagatgaggtttctccatgttggttgggctgatcttgaacgcccgacctcagatgatccacctgccttggcctcccaaagtgctgggattacaggtgtgagccaccgagaccagcagggactgacttttaacagatcagttatttaagcttgtcctctgtgcctgggatggttttaggtacctgtctgcattcactgtgttaatacagtrtagtcctcaaataccgttggtccttgaacaacacagatctgaactatgtggggccacttcttggattttcttccacctctgccacccttgagacagcaagaccaattccttctcttcctcctaagcctactcaacctgaagatgataagaatgaaggccttgatgatgatccacttccatttaatggagagtaaatatgttttctctttgttacgattttcttartaacattttattttctgtagcttactttgtgcacagtatataatatacacagtatttaatacctacgacataaaaatatgtgttaatcaacattagattatcagtaaagtttctgatcaacagtgggctattaggagttgagtttggggagagtcaaaagttattcttgcattttcaactgcgaaggaagtcagtgcctctaaccccagtgctgttcaaggatcaactgtagttcaccaagaaagctggggttgatcccattccagccctaccctgctcttggtgggcacagagagttgtgagacctacctctggccagacactgttctatgtgtggaaatattgcaatgaagaagatcaaccmtccaaatgctcactgtggccaggctcggtggctcatgcgtatcattccaactctttgggaggccatggtggaatgattgcttgaggcccagaatttgagaccagcctgagcaatatagcaaaactctgtctctacaaacaaacaaataaacaaacaaacaacaaaaaataatgctytctgtacataaaccagsacataagtaatataatttcatgggatgatagtcactatagagaagatargggtggtgcagtggaataaggtgagatagggttggtgggcagggctcttctctgggggtcatcagacgggtgaaatttgagctgagatatgagtgatgaggagccgctgcacaaagatgctggatagagggaacagcaagatttgtgycttaggaagctttgagtttctgtgggttttgttgttgttgttgttgttattattttttttgagatggagtctcactctgtcacccagtttagagtgcagtggcatgatcttggttcgttgcaacctccgcctcccaggctcaagagattctccttcctcagcctcctgagtaactgggattacaggtgtgtgccaccatgcctggctaattttttgtatttttagtagagacggggtttcaccatgttggccagactggtcttgagctcctaacctcaagtgatccacccaccttggcctcccaaagtgttgggattacagacgtgagccatcgtgtctggccaagtttctgtgttaatggacacagaagaagtcagcacagctggaaggcagaggacaaggaggtgcatggtccaaggctgtagagagaagggcagcagccaggtcgtgtaagtgactgcacacggcaaggattcaggagtttcctctcattgcaatgggcagccttggggagttttcctctgggaggaaatctcatggatttatactgaagaaataactggctatgtgctgtgtgataacagatggaagggggctggaggggaagcagagaatcgggttgggaggcctgtgggaccgctagaagccacccctgcactaggtaaacagtgtggacctgaaagggacaggctgaagcacgaagtgtgatttacaaatattactcgagccagaataaagacagctgcctggaagcctcagacacaagtgaccttggatatgaactccatttggctttcgtcacaaggtttttaaaggaacaaaaagggaggagtcagggagtggcctgatacaaagttctgtcaggagttctcattggtttccagaaataacattgattagtgataggctatacattattaagctatagggtgtggtttacagtgtccagtgaggcattattaggttaattcataactactcttggcaatagcaagcagtttcagtggatgaatacatagctcaaaaggggcatgtaggatgcgattgatgtctaattttaatgcctatctgggcctaataatttgaaaaggctcacatccctcagataaaagttattttctttcttcaacagctgtgggcactgttggagaagtataatggaaaacaaaatctcccaacccagaaatcctctctacaaaggtagcaaagaaagaaaacactctcattattgagaaaaacattaaaccagaaagtgttacacaccacaagcaatctgctaagagacagccaagacagaaaggaagctcacctgcttatggagccaagcagacacagctcgttccacacacgttttcaagacggacagtaactgttaccaactgagtcagcttttcccctaaagatggtatcgtgaagccaatacatgaaacccaaagcgagcctcaagcagtgcrgactttattcaatggccaaagaatggagaagcaggagcatggccgcaagtcaacttcttgtctagtgagaggtgagggggttaaaatatagggtatcytggctgggtaccctgcctcacgcctgaaatcccagcagtttgggaggccgaggtggayggatcacttgagatcaggagtttgaggctagcctggccaacatggcaaaaacccatctctactaaaaatataaaaaacaaaacaaaacaaaaaaatagccgggcatggtagctcacacctgtaatcccagcactgtgggaggctgaggcaggtggatcacctgaggtcaggagtttgagaacagcctggccaacaaggtgaaaccctgtctctactaaaaatacaaaaattagccgggcggatcacaaggtcaggagcctcctgagtagctgggactataggcgtgcaccaccacgcctggctaatcttttgtatttttagtagagatgggttttcaccgtgttagccaggatggtttcgatctcctgacctcgtgatccacctgcctcggcctcccaaagtgctgggattacaggcgtgagccaccgtgcccaggccgccttcctgtttcttaaagataagatagagaagacaggttagagaagagtagaaattcagctatgtcatgtaggcattacactgggtgacataagtagtaagagaacttgacaacactacttgtcacacacagctcattctaactttacctggcaactgaggtgaccatctgtattagctaatgggctttatctagagaaaaacaagcttcttacatctttgtgacaggaggcagttttgcagcttggaggcatgtgcccactgaaggcaggctgtcaccctcccacagacactgggagctggggccactgtctctcccttgatgtttgcctttcaaggagatggctcccgggtccttgagaaacacatgcctgggtaatcaagctgacaaaagtcctctctgatcttcacaaaaatgttatatacatttgaaagagaggagaaagtgcttataattacaagttttctaaggtaaatgctctgagaataagagagggagggaaacctcttcccccattttcaaccgggagaattaagcctcttgtttttaagttgcatttgtccttacagtggctactaggtgttgggaacactgcccgggagctaggaagagcaattagggctggaggctgtttggcgccaacaggctgttgctgagtgcggatgaaagtccagagagagagtggaaggtgggggtcaaagggcatggtggtgccctgcatggcagatggtggagaaactgcaccaggcaggtgcctcaggctttctgggtcaggggagagggtcaggtggccyttgaagttctgtttgctgttagcctgactgagttaactgcatgggtacctgactgtctttgctcagtctcctagtggacaaccacatttccggaaggcttttcacgagtgatatagcaactaatgctctcccagggctcactgcctggcaggctctgctccaaatgctttcatatgttaactaattcaatcctcactatgaggattctctactcccatgagacagggattgcagggagtataaggttgtgttggatgtgtttcctggcattagtaaaagaggatgtgaggcaagagcaaaactaatgcatgtgctgaaagagctatggtgcaaagagtacacacaaaccttttctccccttctctgtatgctgctgtggacactgttacaaagcatgaaaatgaggccgtagatgcaaaagcttaaaagggtgacccatacctcaaaagttctcagtaagtggcagcattttattatcgtggctatcattttgccagttatatcttaacaggtataaatattgaaacctccttagcgaaaattataacggtgagcaaattatgacagcggaggagatctgacctaaccatctccttcttgccttttaacctctaaactgtcctgggtcattttggggcatgggtcaagctaactttaggagaaatttagtttatagtttaaatgatgatagaccttcccaaaactaagtcatctttgtaaaactaatgaaaggccaccaggtcaaaagaatgagaggggcctgaattctgctgagatgtagacatagttaagcaatcaccagccgttattctggaggtcatgaaatttgcaactttctcaattactcctataattaacatcactactctagaccctaaaattggccttttcagattccttttcagacttttgtatttctgaaaccaggtgactttacctggacccacgacccctacctgtggtccctgacctagaagcaggctcagcatatgaggaccattttttccacacccctatgattgcatctccaaccaatcagcagcatctgttctctagccacctgcctaccaaactatcttttaaaaacccctgccttcatatttttgaggaggctgatctgagtaataataaaactctggtgtcctgttcaggtggctctatgtgtataaaactctttctctattgcaactcccctgtcttgataaatcagctctatctgggcagtggggaagatgagctaattgggtggttacaatattacctcttcaatgtgactgaggttcttgaaggcaggaaattgtcatataatttatgtctcccatgtcagtaccttatatagggtaggtatcaataattactcataaaagatgagaattattggttccctagaagtcattttcccattctaggcatggtgccttttaggggacakarctctgactgaactttatatgtcctccttagttagttacttagggtcttgatttcttctggaggctgtatttstcatttaaattttgctagatattatgcatattacttaagttttcacacttaatggcataaatctgtccctagtattccctctcaattttctaatctcctctgtaactgcagtctatttatatgtcctcagtaaatatttgttgagtctgatagtttttggttaygatcatggactagtgcagtgagggcagttggatattttcctcctgggaggacatctgggattcacaatctggatgtttggtatcatgagacaatctccctgccctggcttggggggccacccatgggttaaggcataagtaacaattcctgacaagagtggrgtcattaatgtctggagcaggaagctgaggggagttgtgtttttctcttgcctcaacattgtaggaggagagagaatcctttctaggcatcagggtcatccctgagcactcctggtgtgattttagggttctccaaggcccactgtggttctaatttcctgccaccatccctgaacatcccaccattcatatcctcagtgtagaaaacagagatggtaactttgactccagaaggtcaccattcacatgaccacttaggagaaaaggagaagggagaacttccagtattttatccaaattctttattcgtcactcagctagcccagacgtcttcttaggaagcattggragatatgagagagtggtgtggggtgggaagcaaatggttggggagacatagcatctggcttttttgggaagccctgctgggtttagacaaatctgcagacaggaggaagaatgagatgaatggcacttaagtgttattcctctccagatcatgattctcccagtttgaattaagactcktctctgagttttggaggagagatgcttggaaaggatgattgaagagattcattcacccattagactccctactattgattaaggatgtaatgaagtgatataagtcatccaataagctatgcttactatgtttttttttaaacatagtaaatgcaagccaaatagagccctctcccaccttagccagtagagtgacatcttaggatcttaggtgaagtcttttttttttggttcttttagtttttaaatttggaggattaggatgacaaaaatgacacctatgggtgaaggggtatggaaggactggaatgacattcagacttttttttcagtaggtttgctggtttaaaaactgtatctgaggacaaaatgcttggattcaaatcttggctccctaactaactgagatctgtcttctctgttctttgtcatcttcatcaataaaatgggggaaaataacactgtctatgtcttagggagaataagatggaacattgcatataaagtgtctaacacaagtcctggcacatagtcatcaataacttgtttattattgtgcttgttaaattccattcacctggaagatccagggatccattcaaagttggctctggctgccgtgatgccaagtgaagtcattccaattttgcagtctaaatagcacacactgccttgtccctaagagaaataccagccccagacattgtgaattgatcatttccactgaaccatttataaggcagagttgatccttatcattaaggtgagcaaagcagttgttgtgggcacttctcttcatgatgatgttcagtcatttaggtctctgtggaatggctggcaggaggccctaatggtgacagaaatcccagtgactactgtcctactggctctggttgggagcctttcctagcagtcctaccatgactggcctcttggatccactctgaattcttctacttctctttgcagtagaaaggcattaactgatatttctctttccaaatttctttgcaatgttttctgtagaagaactgaacattaaataaatattatttctagaactcagttttcgcaaaagatagcatttcagtcccacaagagcaatatttatatcattgcaactatggggcttcggtgggaaaaggatgacaatatttttccatttggatagctgtttcttatctaaacttattaaatggtgagcagaactcttcattgtagacttttcccaaccctgagtgccaaagcaaacacacaaagttcggaccactgacatgttgctgcagtagtataagggcaaataagtctgaatggagataacagacttggaaacggtactttgtgtctctactttcatggtccttccctctactgacatggaaatagcaccctaggcctgcccggggccatccctgaactagggatgcatcccccgtcaaaacaaactgaggacattggataattcacattttacataacagtattttactcagatttatgtggctgctgatgaattttcatcaaaaaagtattttctggaataaaatccattaaaccaatttaatcccttaatcaatttttatgtagtgtagttaaatcatttttatttttctaaaagttaatgaaacattttctatttttatttctgaaaagtaattttcatcaggatagattcttttccatttaaagcttataataaagagctaattaatcaattgatttttgtccccatcagattttcctgagtatagcttctgctactgtgagttttcttttatggccagatccaaagtttccttttgttttatttttcccctgctgtagtcaagtccaatgtctcaggctcaaattctgcacatctaaattttgccagcaatattctgtttgtttgtttgtttgtgacaatgtcttactctgttacccggactgaagtatagtggcatgatcatggctcactgcagctttgacctcctgggctcaggtgatcttcccaccccagcctcctgaggaagctgggactacaggcacgtgccaccaaacctagataattctttgtattttttgtatagatggggttttgccatgttgctgaagctggtctcaaactcctgggctcaagtgtttcacccacctcagcctcccaaagtgctggtattacaggtgtgagccactgtgcctagccagcaatattctttttaatcagttttcgattggtgaaaaagtgactatttctacctataatattcattatggattggataaaacatattgtctaattattttggtgtcattatattcagaattcccagtatagtcatcccttcatacaggaatggaataataaaattatacattaaataagtgttgtaaatacagtagatgtttctaaagctaatttttaaatgaaaggacaatatataagtctakagctaactcctctgtcatgcacaatctgagttaacagaatagwttaggggttagcaagctttttctataaagggccatgtaataaatatttcaggctttgcagttcatatgttctctgttgcaacaactcaactgtgctgttgtagcacaaaagcatcctggactattcataaactaatgagcatggctgtgttgcaataaaacttgtttacacaaacagatggtggtccagyccagatttggcccatgggctgtagtttgccaatccttggaacagataaaygttcatgctattatttgtttagtaagagtattctttagttgccaggttgaccatgaactaccataaatagagagctcctggaatgtacattggaaaagtttttctttttgtccagtttttcaggatcacagctgttatacaaagctctgtgtaccaacaatgcatatatcaccaggctcatatacarttttcttagaggagctcaataccctgtggacttaaattaagaaccataaaactgcttgagagtggacaaagagaagataaccatttttcctatcttactgaaaatagaagcagaacaatcactcggactcacatcataggactaattatggatggagcatattagatgataaaataaaaactaacaggaaaggaaagcatgacactagctttggtattcagtcatggcttagagttactagcctcatctgggtatagcagacaagctctggccttaggaaaatattatactctacactttgatgactcccctaaaaacaaaacaactaaaacaattgtaaaaagcaaagcctattacaaagagggagccaaaattcaacatgaaatatactgtgcttaatagaattgaattcttgaataatgttcttctggcctccaagtgagaataaaggttgtgctatttaagaatgtttttcagctgcacataactgcctgtattagtccattttcacactgctctaaataaatacctgagacttggtaatttataagggaaagaggtttaattggctcacagttctgcatggctggggaggcctcaggaaacttacaatgatggtggaaggggaaggaggcaccatctttgtaaggctggagaagagagaaaagtgtgtgtgaaggaggaactgtcaagcacttataaagccatcagatctcatgcaaactcactctcatgagaatagcataggggaaatcgtccccatgatccagtcacctccctctcttgacacatggggattacaggtgcctcccttgacaggtggggattacaattcgagatgaaatttgggtggggacacagagctaaaccgtatcattctccaccggcccttcccaaatctcatgccttttcagatttcaaaaccaatcatgccttcccaacagtcccccagaggcttaattcattccagcattaacccaaaagtccaagtccaaagtctcatctgagacaaggcaagacccttctgcctaggagcctgtaaaatcaaaagcaagttagttacttccaagatacagtgggggtacaggcagttggataaattggccaaaacagaagggctacaggccccatgcaagtccaaaattcagtggagcagtcattcaatcttaaagctccaaaatgattgcctttgactccatgtctcacatccaggtcatgctgatgcaagcagcaaggtcccatggccttgggcagctccacccctgtggttttgcagggcacagcccccttcctggctgctttcacaggctggcattgagtgtctgtggcttttccaggtgcatggtgcaagccaggtggatctaccattctggggtctggaggatggtggccgtcttctcacagttccactaggcagtgccccaatggcaactctgtgtgagggctgcaaccccacatttcccttccacattgccctagcagaagttcttcatgggatctccacccctgcagtagacttctgcctggacatccaggcatttccatacatactctgaaatctaggttcccaaacctcaattcttgtctcctgtgcacccacaggcccaacaccatgtggaagctgccaaggcttggggcttgcaccctctgaagcaatggcctgagctgtaccttggccccttttagccatggcttaagctggaggggttggaacgtaggacaccaagtccagaggctgcacagagcaggcgggccctaggcctgcccacaaaaccatttttccctgttaggcctccaggcctgtgatgggagggactgtggtgaaggtctctgacatgccctggagccattttcctcattgtcttggtgattaacatttggcttctcattacttatgcaaatttgtgcagctggcttgaatttctcccaagaaaatggttcttttattttctaccccatcatcaggatgcaaatattcaaaactttyatgctttgcttcctttttaaacataagttcctatttcagatcatttctctcaagttcaaagttccccagatcctaaaggcaggggtaaaatgctgccagtytctttgctaaagcatagcaagagtgacatttgctccagttcccaataagttccttatttccatctgagaccacttcagactgaacttcattgtcaacatctctatcaacattttggtcaaaaccattcaacaagtctctaggaagttctaaactttcccacatcttcctgtcttctgagccctccaaactgttccaacctctgcctgctacccagttcaaaagttacttccacattttttgatatctttacagcagtgtcccactctctgcagtactaatttacttgcctaaaaatgctgcaaatagtactcacacaatagtgcagagataggcaatcatttgtactagtttaaataactctatatgccaagcaaaaacccaggtgttttctatcattctttgcttgctggcttttggtccttacacttgttgcctcatggttgcaaaatggctgttttgtctccagacattacatcaacatttgaagraggaagmagggttagtgtctgagccactgactctgctgataaaaggacagagaaagctctcccaaaagccctcaacagatttctgtttgtctcattggtcagaactatcttacttgaccactaatggttacagaggagagcagtgatgcaggatttttctcggyccctttgccagtcagggacctcttgctggtgatgctggaggccttgcttggggcacactacctgtccctggaggtgcctcacccaatcggcccccctgggccaggtctggcttgtataccagttcctgagttcttgtcccacgcccagaatgaatgaggctgtgctgaactctgaagggtgagggtgatggagaagaatttttttgaccaatgaaacagctttcagtggggaggggatgcaggggtggtctccctaccagaaggtgggaaagtcccccatgtggctgggtctggggctttttatggactcagaatggggagtatgtgttgattggtttatgagtatgcaaaaaaggttaaagcaaagactctactcaaaggtgggcatgacagtgtagaaaatcagttaggaaaggacaggtatatgtaaaataggtgaagggtggggatcaatcagaggaaagcacaccaaacaggaagacaagttctcaatctggtccaaggatttaagttgtagcttggctttcaggctttaaactgtcttcagcttggaggcgggatttcaccggggacccgccccatctgcctaggcatttggctgcctcctcctgcccttagtaggaaagtgagtgtttcattttctcaatttatctgtggatgtggacaaaggggaaaggggtagggaatagggggttgtagtcagcctccaacagattattaccactgaaattgtgccctaaaggattaaagaagtcagtaactaacagaaattcttgagtttgcaaggtaagaaacaacttgctcaaatgctgaaactccctctgcttgtgagataaaactagcagaaatcagttggaaccaccatggccaactggagtttgcacacagtgagcttggtgaagtcacggcccgaatttctaccacgtgtttcatattaaccccttgaaattttctcatgggacccctgaggcaacatgaagagataactgtgcaaacctgaggattttctaggcctcccctttcctttcactaatcacctacaatcccaatatccaccccctaaaccttttctaataaaattatgccctgccttaaagccatctcagggagacaggtttgagcttgacccctgttgcaatagaaagcttttcttttgtcaaaaacccagagtcatagcactggcttctagtgcatcaggcagcaatcactttttgcttgataacaccatttttcataagtacctgaaactggattcactaattatgtcagctaatgttgacattgatagaggtaaacgactcatttcttatttataaatctgcaactgttgacaagaaaagccattggcttggttataacttttgaaatgtgctgcaattagccaggtgtggtggctcatgcctgtaattccggcactttgggaggccgaggcaggcggatcacgaggtcaggagatcgagaccaccctggctaacacggtgaaaccccgtctctactaaaaatacaaaaaattagctgggcatggtggcgggcacctgtagtcccagctcctagggaggctgagacaggagaatggcgtgaacccaggaggcggagcttgcagtgagccgagatcccgccactgcactccagcctgggcgacagagcgagactccgtctcaaaaaaaaaaaaaaaaaaacataatgataataataataataaaaaatagaaagaaatgtgctgcaatcacaaaatttcccagaactttatcttatatgaccgttttcctccagctcatggacagctatgtctgaatcaacagcagtccatagggcactgcccgaggtatcaggtgatgtctaaaaggattcaataggaggagcaggcatctgggaatataccaaaggaaataaagtcaacacctagtaacaatatctgcactcccaagttcaatgcagcattattcacaatagccaggatatggaaacgacttctgtctgtcaacagatgaatagataaagatttggcatactgtatacacacaatgggatactattcagccttcaaaaaagcataaaggccaggcatggtggctcatgtcttaatcccagcactccgggaggctgaggtgggcagatcacttgagctcaggagtttgagaccagcctgggcaccatggtgaaaccctgtctctacaaaaaagtacaaaaaagttggccaggtgtcatggcatgcatctgtagtcccaactaccagggaggcagaggtgggtggatcacttaagccagggaggtcaagactgcagtgagccatgattgtgccactgcactccagcctgggtgacaaagtgagaccctgtctcacaaaaaaaaaaaaaaaaaaagcggtgtggaactgtgccgcttgctacaacatggatgactggaagacattatgctaaatgaaacaaggcagatacagaaaggaaaatactgcatgacctcatttatatgtggaatcttttttttttttaaagtgaatatacagagatagagaatacaacagtggttaccaggagttgaggaggagagcagggaggagatgtaggtcaaatgatacaaagcagcagatatatacgatgaacaagtctagagatccagcgtacaacatgaggactatacttaaaaatgtcacattgcacttgggatttttgctaaaagagtagactttaygtgtccttgccacctaaatgagtaactgtgagatgatggatatgttaattttcttgactaccataatcattttactatcttcatatcaaaatatcatgctgtacaccttatataaatacaataaaaattattattaaaaaagaaagaacaggctgagaatggtggcttatgcctgtaatcccaacactttgggaagttgaggtaggaggatcacttgagaccagtagttcaagatmagcctgggcaacatagcaagaccctatctctacaaaaaataaaaataaaaaaattagccagatatggtagcatgcacctgtagtcctagttactctggagactgaggcaggaggattctttgagacatgatcatgccactgcactccagtttggaggacagagcaagaccccaactctaaaacaacacacaaaaatacagccatttctcctgggtgaaatgggggagctcagactattttgttttatttgtcaggagtctaaagcccatgtgagccaacttaagaaaattctgtttgtatttgagtgttctttattggaaagaaatggacttttccctaatgagcccattttacaaatcgagagctccaaatgcccggttccagcccccatgatatagatgggcagcaatgaggaccagaaatgctgggaagtgtccttgtcatgcaaggaaaacttggaacttcaaggatccatcatgggatgcaggacagtaggctccacccctcttcctgctttccagtaaatgatgttcagggctcacatgyctcttccaaggcatgatgtggggttgcagttctgatcccagcagagaacaaggctcctgtgaaacaattagttttggctcagaggcaaaaaatggaaaccccattcctgtatttacccttcattctttccttacctcatacagctggttccaggtttgattgcatcatatacataaataaataatctgctttcctggtttggtttagttttgctggagagaggagtttatgtgttcatcccatgactagctgggtggtcaagagattggaaagtaggagttctagtttagaccaagtctcatctcagaaaccacagagtagaactgatcccaaacgtcatcatccctgtagggaaaagaaagagagatcagactgttactgtgtctatatagaaagggaagacataagagactccattttgaaaaagagctatactttaaacaattgctttgctgagatgttgttaatttgtagctttgccccagccactttgacccaacctggagctcacaaaaacatgtgttgtataaaatcaaggtttaagggatctagggctgtgtcaaagtggctggggcaaagctacaaattaacaacatctcagcaaagcaattgtttaaagtacagctctttttcaaaatggagtctcttatgtcttccctttctatatagacacagtaacagtctgatctctcttttttttccctacatatcccaatagcacctgcctgactaatacatcatgctctgctgactccatatgtggctggtttcctggatccgattctgactgatggtatctgttctcacrctgctaataaagacataccagagactgggtaatttataaagaaaaagaggtttaatggacttatgtgttccacgtggctggggaggcctcacaatcatggtggaaggtgaaggaggagcaaaagcacatcttacatggtggctggcaaaagagagaaagcatgttcaggggaactcccctttataaaaccatcagatctcatgagacttatgcactatcacaagaacagcaccagaaagatccaccctcatgattcaattacctcccactgggtccctcccatgacacatgggaattatgggagctacaattggagatttgggtggggacacagccaaaccatatcagatggcttatttggtttctatgtagaacctctgcttttcattcaacagtcttcatttagccacagataagctctgtccctaacttccrctgatggaatgtacacataagaaacttccactgatggaatgaacacagaaggtgcctactgggaagaaaactggcctgaatctgagctgggtcaaatgtctgcagtcagtttgaatggctgctccttatgggaataatttacattctcaataaaattctctagcaattttctgattgattttaatgagctttaaagccttmcgtagaagatcccccagctgatagtcagccttgggcatggattaagggcttttaaccaatcttgcaacaagtttaagcagatattctttattgggtccaatctaaccaaaattattttcttatgttctccccagtaacgtgtcattattaagagaagtttggcttgcttagaggccaaatttagagggtcctgaaattttattttcttttacaccactttccagcatgttacctgatcagttgtttattatctttgctgttgaatggagtgatcattccaagggccygaggcaggaggcccaggcacagtggaaactctcccaaagaccaggatctttgttttgttccctgacatatgctgagcaccaggaatagtgartgaatgaaacaaattgtgaggctttaaagagccgaaatatttaaacactgggcacaaggttgttgcttaatcagtgctagatccttacctcccccttgtgtccaggtsgacttgttactgcagttaaaccacttgctgatcctcaaacaactagttagtggcacagccaggcctaggaccccagtctctactgttccaactaacccattcgcaggcaggagcactttgaatggtctcttattttaaaaaaattaaattaaaattgtctatttatttagagacagagtcttactctgtagcccaggctcgagtgcagtggtgcaatcatagctcactgtaacctccatctcctggcctcaaaaagtgtttgaattacagatgcgaggcactgtacctggcccgaatgttctgttcagacaaagccacctctaagtcgctgtggggccccagacaagtgatttttgaggagtccctatctataggaacaaagtaattaaaaaaatgtatttcagaatttacaggcccatgtgagatatgatttttttaaatgaagatttagagtaatgggtaaaaaagaggtatttgtgtgtttgttgattgttcagtcagtgaatgtacagcttctgcctcatatccaggcaccatctcttcctgctctttgttgttaaatgttccattcctgggtaatttcatgtctgccatcgtggatatgccgtggctccttgaacctgcttgtgttgaagcaggatcttccttcctgtcccttcagtgccctaataccatgtatttaaggctggacacatcaccactcccaacctgcctcacccactgcgtcacttgtgatcactggcttctggcgactctcaccaaggtctctgtcatgccctgttataatgactacaaaagcaagtcttacctataggaaaataagaattataacccttttactggtcatgtgaaacttaccatttgcaatttgtacagcataaacacagaacagcacatctttcaatgcctgcatcctgaaggcattttgtttgtgtctttcaatctggctgtgctattsttggtgtttaacagtctccccagctacactggaaacttccagaaggcacttttcacttgcttgtgtgttttycccagtgtctattagaggcctttgcacagggtaggctctttggagcagctgaaggtcacacatcccatgagcgggcagcagggtcagaagtggcccccgtgttgcctaagcaagactctcccctgccctctgccctctgcacctccrgcctgcatgtccctgtggcctcttgggggtacatctcccggggctgggtcagaaggcctgggtggttggcctcaggctgtcacacacctagggagatgctcccgtttctgggaaccttggccccractcctgcaaacttcggtaaatgtgtaactcgaccctgcaccrgctcactctgttcagcagtgaaactctgcatcgatcactaagacttcctggaagaggtcccagcgtgagtgtcgcttctggcatctgtccttctggccagcctgtggtctggccaagtgatgtaaccctcctctccagcctgtgcacaggcagcctgggaacagctccatccccacccctcagctataaatagggcmtygtgacccggccrggggaagaagctgcygttgttctgggtactacagcagaaggtaagccgggggccccctcagctccttctcggycttgtctctctcagatgtaactgagctgtgggctaggaggaaaaggccgggaggaggcacggtgatgactgaaaaacctctcccctctcataagaccagtcatcyggacgcgggctttcccccactcggtgcccacctggggtcttacaggaggagctgctcctcctcagcaataggacaagatggtcaggtcttcctgcttccgctgagaaaagttagggtcctcaggaacggagcagactggtacaggaacagagtcatcatggccaagagtccaccgggtcctcttgccatcaggaggaatagcagggcttgtgcaggaattggggctggagggaagggccgggctcggtcagtctccagctgggatccccagagtggtcaccctacccctccctcgagacagactgcctgactgtgtgtcatcaggctggtcaccatctccctgaacctcgatttgctcacctataaaatggaactaataacgatgcctgggctccctgtctcaggggctctggtatagctgaagagaactaatataacatgaaagtgctttctaagctttgggataagctaaaaggcagattccaattttattcgagggcagcgtagattggtgcttcagctcgtggatgacagagtcagggggcctggttctgagtcctagttctgtctcttcccagctgtgtgacgttgaacaagycactggacctctctgttcctctgcaaaacagcatgaaccaattcattaactacttctccaggatgcagtaggtcccagggactatcctaggaatgtgggctgtattagtaaacacaacagcgggaaccctgttccggggctcacattcacatcagagcaaacagacaaagacgctggacagaataagtgcataactacatggtacagagggttataaggagggaaaaggggagctggatgagagagttgagagtgcccggtgtgatggggaaagctgcagggtgaaatactgcatcagggaaacctcagggaaggtgaggactatggtgaggtcagaggggttgatatgagaacagtgccctgcaaatggcaggcaccacaggagcatgagccrtcatcttcacctttagcattcagcccgggagaagtagggagacatagaaggggcaggtgctggccaagaggcaggggcaggagaggagaaggcggaggggcactcagggcgagggtgtcaggcccrccaccccagagcaccattactcccaggacgcggctgcgtgcagacctggaaccagcctagggagcagccgcagatcacaactgagaacaaacgacagtctctgcctcaaaaatggcccatggaattgcgtctctggagacgctgcctgagcaggagcagcacagtgagcgggctgcatcgaccagcgccatccaaaccccgaacagttggcgcttgtcaggcaggacttcccagcagtcggttcccacaggtttcccctgttgacctgatttgatgtgactgtctagattaggtgtgaactggtggcttaggcttctctgcacagaaaggcctgcaagcagcagagagagttttctgttccatttttccatgtcatgtggctcttcctgagaacagcggatggagtcaaatgcatggggagtggggtgagatggtagctgaggtcagaatttggcatttgaatgactgaagcagaacaaaacacaccaggtacttcagcagctgcaccgtgttgagggcaggtgctggttacgggtctgggtgagggaagccagctgccaatgtaagaagaatgactgggtatgcttagatgaagcagaaaaatctaggcatcaaggtggccttgagtcagtgatgacacgctacagctccaaggaagcctggcctagccctggggggacagaaaaggccaagaagtgacgatattgcagtacacccccctccacaagaaatgagtgagatgtggtacaaaatgttagaattgaatgaatcaatagaataaacgttcatcccttcaatcaagaagagtcagatgaaatgaattagcagggccagcccaagaacctcttctgggggtctcagggtagctttcatttgtagcagctgaggckgaagcccagctgcaaggcctttgagagaacgtggtgctggacccgtgtctagggcaggggttctaaaccctgcttacatatcagagtcacctgagaattttctatttttttttttttttttttatacgtggtcccagcacagactaaggaatccaactatcattgggcaagccatgctaggtatgcatgcctttggggctctgcaggggatagcgctatgcagggatggttgagagctggttttggggttgagacacgtgggaaatacttggactttgggctgagcctgtggtgctcaatcccggctgcatgttgggaccacagggagatgacaaaaccatccccagccctcaccctagggccctcgaatgagcatctcaggggtctaggaggcctccacaaagacctactgattggcacacacttgtttctctaggaagagaacttacagctgcaggcaggagcatgtcttaatctgcttgggctgccataagtaccacagactgggagggtttaacaacagaaatgtgttatctcacagttctggaagctagaagcctgggagccagccatcagcagagttggtttcctctgggtcctctatccttggcttgtagatggccgtcttctctctgtgtccccacatggtcttccctctgtgtccccacatggtcttccctctgtgtgtgtccatgtcctcatctcctcttctcataaggacacaggtcatattagatcagggctcaccctcatggcctcattttaacttaatcatctctttaaagatcctgtctccaaataatggtcacattctgaggtcctggggttgaggacttcaacacgggcattatggccgttgggggaggtaggacataattcagctgatattggtgcattttgcacttggatcatgtagatattttccatggagctttgaatccatttcttcttttttttgtagacatgaatggatttattctgggctaaatggtgacagggaatattgagacaatgaaagatctggttagatggcacttaaaggtcagttaataaccacctttcaccctttgcaaaatgatatttcagggtatgcrgaagcgagcaccccagtctgagatggctcctgccggtgtgagcctgagggccaccatcctctgcctcctggcctgggctggcctggctgcaggtgaccgggtgtacatacaccccttccacctcgtcatccacaatgagagtaccygtgagyagctggcaaaggccaatgccgggaagcccaaagaccccaccttcatacctgctccaattcaggccaagacatcccctgtggatgaaaaggccctacaggaccagctggtgctagtcgctgcaaaacttgacacygaagacaagttgagggccgcaatggtcgggatgctggcyaacttcttgggcttccgtatatatggcatgcacagtgagctatggggcgtggtccatggggccaccgtcctctccccaayggctgtctttggcaccctggcctctctctatctgggagccttggaccacacagctgacaggctacaggcaatcctgggtgttccttggaaggacaagaactgcacctcccggctggatgcgcacaaggtcctgtctgccctgcaggctgtacagggcctgctagtggcccagggcagggctgatagccaggcccagctgctgctgtccayggtggtgggcgtgttcacagccccaggcctgcacctgaagcagccgtttgtgcagggcctggctctctatacccctgtggtcctcccacgctctctggacttcacagaackggatgttgctgctgagaagattgacaggttcatgcaggctgtgacaggatggaagactggctgctccctgaygggagccagtgtggacagcaccctggctttcaacacctacgtccacttccaaggtaaggcaaacctctctgctggctctggccctaggacttagtatccaatgtgtagctgagatcagccagtcaggccttggagatgggcagggggcagccctgcggacatacctggtgaccacccttgagaagtggggaagtggctgctccgctgggtccctggatgggccgtccacctcctggacctgctgccctactatgtgcacgactatacaacatcctttttcttacatcatttaatccccttatgatgtggtgaagaggtatttgtgcctttgtttaccagtgaagaaatagagactcggagaaacaaagtgccttgctcaagatggcacagccaccagtgggggtcctgggattgaaacccacatctcctggccccacagcccagttctacactcagaagggtcaggttcatatctcttgagaaggtcaggaactggggtccctggcccatgcagaaataagcaattggcttgcttaaatccctttcatgttaggaggggcattactgaaaaccctctactacaaagattgttgatttttttttttttttttattgagacagggtcttgttctgtcacccaggctgcagtgtagtggtgccatcattgctcactgtagccttgaactcctggcctcaagcgatcctcccacctctgccttccaaagtgttgggattaaaggtgtgagccactgcacccagccacagattgcttaaagcattcatttaacaaatacttgttgargatttgctacttgtaagactttaagcctggcatctcagaggaggccagaggagggctgtataggccctgcctccaggcttttaaaggtcaatgggcaaatgcctaggatttggagctgcagggaaacgtgctccacaaggtaactcagggaagcctcggggctctcagaggacagaggtcactggggagcggagagcaggccttgcctggcagtgagggmaacagggctggtgaagctaggagcaagcatgatgagcccagcctgcagagtttggggcaaggaacgaggatggggcggttggcttggcatgagtgttgaaccagaaaatgggcctggggagggcagagctggagacactttgaacgccatgcttggtaggtgtgggaatggggacgcgttctgttcagaggtcatcccggaagcctgccgtgtgcagactggaggcagggaggattgtttgaaggttacgcaagagtccaggcacacagtcacgggaacacgtgctcagggagcagctcggcaaatccatgggtggggtggggctgaggggtgtgtctaagagacactgaggaggctctgtcaagatgttaacctcgtgagggacagagagccaggcgggaggtgaaagacaagactgtggagaaagaggttcagtggcgcatagtgatttttcttaccacracaacctccttgaggtctttcccttcgggttcagggrgaggtgatagatggggggattgctcagccctggcactgactggtcacaggggcagaggccagcccgagggttgcccsgttgagggtggcagcacactgtgcagggcagagcagggacacatggacttagcctgctgtccctaggagaagtgytgggaggagcgctcactgagaaggagggtcctgcagaaggcaaaggcaagaaagccagtggcatctgaaatgggtctcccttcgaaagagagcacatccacctgacccagaccgcagagccaggccaggaggaagaggaggaagaataaaaaagccaaccacatcgggactcaaaggaagcccaggatcctcgccggcctccaccgcatgctgccctgaccctgccccacttcctaactttgctggcctcagtttccgtcaaaggaggcagccacttcctgcccacatggtctgtccagtgaggagatcgggggctgtctmgggacctctaggtttccctttagcaatgatgttctatttacatgacctcagcaggcagctagatgtgtcccactagagaggacctgaggatctggggcctgatgggctccagggtaccgtctgcccagtgcttgctgtgctcctgagcatggggcgctggccctggtggtttccatgacaccaggtcctgacttgacctcgacagatttacctagcctccggatgagaatggtgagctgtgcrtgtcagacgagcagagggaagacggcagccactctcatgtcaaatcccagcgtcttttgggaggcagcttcccttttttagtttagtttgttggaagaaaagaattgtccctttcccccctctaaactaaaagccttgccagcccaggtgggcagcaccgaggtccctgcagggaacgtgcaaggggaaccctgcagtttcccgctcacatgcccttccgagactgagtgctccgaggactgaggacgagaaatatgccaggtctgccactgccttcttacgagacccggacccaggggaggcacagccatgcccagctcctgcctgccagttctgtcctcccagctgccctactttcatgctgggacctccaattcagtacaaagggagacctcactgtttctgaaccatctctactcagactcccaagtgccacgtgcccaggggactgttctgtgacaaacttatacacaacttcaccctattctcctaagaacaaccgcagaataggcctttcaggatgagtgggaggacagccgagggcagggatgtgctagtgtaaggtcgaggcagagggtgggctgctgtcatggaaagaccccaggtaactgcgtcacacacaaatttgtgtccttctcccacaacgggctctcccgagttctctgtcatctgcacggccctgtgagcaggaggggaaacagagggctcacccctgcccccaaggcccagtgtgcaaatccattcatcacaacgaggttgtgtgagtctccccagtagcaagggctgctgaggaatggagccctcgtttccggggcctgcgtggcccactctgtattctatgactgtgatgggggagggtgggggccacaggacagctggtgggctctgccatggctggggctagacatggattaaaaagtgagtatgagcaggggcctctaggagtggtgggatagtgcggtggtggccacatgtcattctacgtgcgtccaaacctacagaatgtaaaacaccaggagggagactcaaagaaaactatcaactttgagtgctgaggacgtgtcagtgtaggttcgtcagttgcaacaaatgggccacgctggtgtgagatgttgatcacgggggaggctgtgtagtgggggacaagagttatatgggaactttctgtactttctgctcgattttgctgtgaacctaaagtcactctaaaaaataacatctcttaaattttttaaaaagtgagtgtgtcaaaccacagcctttgggtcaggacagttctaggtttgagttgacctggcaggtaccagtggcttatgtcccttaaggtgacagatgcaaaacccccggtttggtgcctggcatgttgtgtgtcttgcaggtggcggttagggctgcctcagtgaactcaaatggctgcattttacaggagaaatatttgagccacacttgcggtcctgtggccaggagaatgcagagtggcctggggggggccaaggaaggaggctgaggcagggcgaggggcaggatctgggcctttggtgtctgccagccctcattcctgcccctgtcttgggtgactcttccctccctgtctcctgtctggatttcagggaagatgaagggcttctccctgctggccgagccccaggagttctgggtggacaacagcacctcagtgtctgttcccatgctctctggcatgggcaccttccagcactggagtgacatccaggacaacttctcggtgactcaagtgcccttcactgagagcgcctgcctgctgctgatccagcctcactatgcctctgacctggacaaggtggagggtctcactttccagcaaaactccctcaactggatgaagaaactgtctccccggtaggagcctcccggtctcccctggaatgtgggagccacactgtcctgcccaggctgggggcggggtggggagtagacacacctgagctgagccttgggtgcagagcagggcagggccgyggtggcacggggctgggcaggcggcctgtgtgtctgtctaccagtcctcyatccagccagcacccagctctccagttagtgtctgtctttcaagtgcaggcaaggtaaaggaggagaggaagaatgctttttctacacttacacttgcctggtagttttggagggggagaaaacattgcaatccgccctctgagagaggaccattttggtcccacacctgacacacagcacacctgtgacatccaagagcttcttggaactgacttgccaggagggttcggacttcgcgtgagcgggggtggggccttctcagggagcgtcccttgactccagaacgcccttgctggcggctggcggctgggtggggataggtgttgttagctcctctttcctgctgcaattcctttccacagagccctggactcaaactacacatcaccccagatcatcgaggcctggaaatctgctcccagaggcaggcattgagtgacacgatggcttgacatcaactctgggtgttttttatgttttaaaaattgtgatggtaaaatatacrtaacaaaatttgccatcgtaaccattttcgagtgcacagttcagtggtactaggcccattyacactgttgtgcagccatcacccccgtccatctccatttatcttctcaacttcccaaactgaagctctgtcctgctgaaacactaactctccatttccccttccccttggccccggcaaccaccacgatgtcctcgaggttcacccatgttgtagcacatgtcagaatgtccttccttttgaaggctgaataatattccattgcatgtggttaccaccttttgtgtatccactcatccatcgatggacacgtgggttgcttccacctttgagctgctgtgaatagtgcagtgtaccctgtaaacatgggtgtactgtcagctcttataagtgcttgatacatcactggaaatgtccatgggctctgaaggatgccaaaagatggaagaggctctatacgaagatcaatcgagttgacatagcaacgtgtccagcacgaggttgacactgtaccctcctgcctctctccttttcatgggtgtcatgtcatcaagaacactgctgtggcagtagtaagacacagtgcattatttcagagaatagcatttaaaaattacccaagtaacacaccttcaatgcagccaacctaaaaacagaatgcaccaaaggacaaccattcctaggtcctcatcggtaaatcttctatgtccctcacatagtattgcaaatgacatgaaggatttttattgtaggttttgctgaaattttccccaagggggaggatgacttagttgggtgatgggggkagcaaacatccctgtcgtcagggttgggtgcaaggagcataagcctgcctggcctctgggagagccctcactgtgtggcctggagccttcctaactgtgcrtcatctccccaggaccatccacctgaccatgccccaactggygctgcaaggatcttatgacmtgcaggacctgctcgcccaggctgagctgcccgccattctgcacaccgagctgaacctgcaaaaattgagcaatgaccgcatcagggtgggggaggtatgtgtgagcctgtgtctgtgcctgacctgggttccaagtgtgcacagggtgggaggcatggatgtaagggacacagaggaggctatgggtggggccagcagggcaagagggagcggagagtagggccaaaggtgggagagaagtagccagagcattctggggccttccaggtgcagagcagcaaatccctccccatccctgctgtgcctcctcctgctaggtgtgtgttccatggtcctgcttggccttgccttgcctcagggtcctccagggttcctatagtggagttgaaaccgggatgaagacagcaagcacccctggacctggtgccctgggcccagccccttcttcagggaaatgctgagcagcagacagaatgtccccctgccatgtggcaccatgcacatctgcagctaccaaggatgtgccttgatgttctgggccctgtgctcagtgctggggagaaagtgggagttcttacgggggccagcgggaagagccctctgtgctaagttagctaagccctggcactggtgggccatggccaagggagccaggaattctgcctgggacatcagggcagaatgtgaagatgggaggatgtaaggggtgtgttagggaggagccggcatgtgagtttggccattgtggccaattaacggtcatctacacacagacacacccttgcctacactgaggggcaggcatacactgtgcatcctcctggcaggctggaaaatgtccccctccaggacagtgcacagcacagaggtcctgagcccaccccggccctctagccctcagcaccctgggtcacccagtgcgccctcagaatgatcctgatgtctgctgctttgcaggtgctgaacagcattttttttgagcttgaagcggatgagagagagcccacagagtctacccaacagcttaacaagcctgaggtcttggaggtgaccctgaaccgcccattcctgtttgctgtgtatgatcaaagcgccactgccctgcacttcctgggccgcgtggccaacccgctgagcacagcatgaggccagggccccagaacacagtgcctggcaaggcctctgyccctggcctttgaggcaaaggccagcagcagataacaaccccggacaaatcagcgatgtgtcacccccagtctcccaccttttcttctaatgagtcgactttgagctggaaagcagcsgtttctccytggtctaagtgtgctgyatkkagtgagcagtagaagcctgcagcggcacaaatgcacctcccagtttgctgggtttattttagagaatgggggtggggaggcaagaaccagtgtttagcgcgggactactgttccaaaaagaattccarccgaccagcttgtttgtgaaamaaaaaagtgttcccttttcaagttgagaacaaaaattgggttttaaaattaaagtatacatttttgcattgccttcggtttgtakttagtgtcttgaatgtaagaacatgacctccgtgtagtgtctgtaataccttagttttttccacagatgcttgtgatttttgaacaatacgtgaaagatgcaagcacctgaatttctgtttgaatgcggaacmatagctggttatttctcccttgtgttagtaataaacgtcttgccacaataagcctccaaaaattttatctttyatttagcagccaaacagatgtatacaattcagcagatagactgtgcaaacgaaagtgctttcctggactttggatggaatttccatgggaggtctgagccagtacttagcagtcctttgaagttttaggtgatgcttttctctggacacttccattggtaagcagtggtggccatctgtgtgatggacagggggcgggaagagggtgacagggaaggccccataccccatgtggcacctgggaaaggaaccaggcagatgggacttcttccgtcctggtgacacagggccagactgctgctggtattgtgccccgggagtggaaggtagagaaataaatcttcacaaataaatatttgcaattttcccccatctgttgagtgcctctgcctgctcctcctcgatgggattaggcccacagttcggaatcttggggagagccaaggaagcggtaggcacccagtaggcccacggccgtcggctgatagcaatggtgatgctgtcctacctacttgtgtaaggcattcgatcttcctcccttccatacatattgaaataaataagccgcgcaatgtgttagctattgatcagaactaaagtgaagtcagccacggggattacaaatctcggcttctcccctcatgttcctgagagtcttcccctggttttgaacacatctccctagctcgatgtcaaggtgagggattctgtcggcaacagcagtgcccttagttgcttcgtcgtaactccccgtcaccggttttattcagttaccttccagtcccactctcagagcttcctggcttgttctgctctcaaagcgggtagagctggcacacatggactctccgaaacggctgcaagatgccaagtttctcggaagaactggaagcacagagaccagaagtgccttaaggtctcgctattcagtgtggcgcttagaccggcagtggcggcagctgccctgggagcttgttagaatgtggcttctcacgcccctcctggacctacagagtcagaatctgcagttttacaggaggtccaggcttggaagttgctcgtagagacctgagacagcgcagccacgtgctggaaacaaagcatttaagtttgtgactttattttaaaaggcagcaggcagtcgacaaaccaatttcttctacttagaggcggcttcggcttctggaagtcgctaggagtataaagttgccaaccagcgctgttctcccgctgttttctgtgcacttataaatgggaagttaggtcaggatagatctctcagctattacaaggatacaaaatacgaacattctacaagttacttaacacacacacacacacacacacacacacacacacacaaaattaattccacaggtcagtttctctgaaacattttttcactaaattctaagtcttcctggagttgcaagtgcctatctcctagacaaggcaattactcaccaactaaaatcactgtcaatctgagatttcggctgggcatgagaccatggtcaggggatgctttgaacagcctctgaggaaattagtgagtttgaaaaatggaaagatttttattactcacttggcagtaaaacctgatggggacagacgtcaggctgtttaagatcctcagaagaaaaagttgatagtgtgaatattcctaaatttgccacacgaagatgtacatgtgattataaggtgctgttgcagaagcccctgggggtgttatgggatatacactatatgggccactttaccttcctaaaatctgaaaaacttcaactactgaaacatggactgaaggttttgaatagtggatggtgaatttgaataccatcccgtgtgatttttttttctagcagactttagttttttagagcagttttaagcccacaccaaaactgagaggaagatacagcaatttctcatataccccctactaccttccagtctcccccattattgacatcccccaccgagagtggtccatttcttacaacccacgaacctacattgacacatcattattactcaacgtccatagtttacattagggttggctcttggtgttgtacattctatgggtttagacaattttcaggagtttcactgacctgaaaatcctctgtgtccctcctattcacccctccttccctcctaaccactggtaaccaccgatcctattcccatcttctccatagttttgcctttcccacccaggatgtcatatagtggaatcattcagtatgtggcctttccagattagcctctttcacttagtaatgtgcatttaagtttcctccatgtcttttcatgatcgctcatttcttttttattgctaaatactatgccactgtctggatgtgtcacagtttatttattcacctactgaaggacatcttgcttgtttccaagttgtggcaattgcgaattaagctgctacagacacccatgtgtgggtttttgtgtggacatgtttaccccacacaatttttaaagttgctcaatgatcagagatgttctgagtgactctgatagacccacaaacatgtcagtgactctatcccttcaagagagtaagggtctcagggcccacacccctgaacttgagtaacctcattcttctgttaagttagctggagccaggagaggagtttatgactaagtcctcaaaagccaacacaacagaaacaaaaattgaaaactggcactaagtaaactaaagagcttctgcacagcaaaagaaactaccaacagaggaaacagatgaactaaagaatgggagaaaatattagtaactatgcatccaacaaaggtctaggatctagaatccataaggaacttaaacaaatcaacaagtaaaaacaaccccattaaaaagtgggcaaaggacatgaacagacacctctcaaaagaagacacacaagcggccaacaaatttgaaaaaatgttcaacatcactaatgatcagagagatgaaaatcaaaaccacagtgagataccatctcacaccagtcagaatgcctgctattaaaaaatcaaaggaacaaaagatgctggtgaggctgaggagaaaaggaaacacacacactgttgctgggattgtaaattagttcagcccctgtataaagcagtttggagatttctcaaagaacaaaaaaacagcattaccattgacccagcaatcccattactgcatatacacccagaggaaaataaaccattctaccaaaaagacacatgcactcatatgtttaccacagcactattcacaatagcaaagacatggaatcaacctaggtgtctatcagtggtggactggatacagaaaatgtagatatacaccatggaatactatgcagctataacaaagaatgaaatcatgtcatttgcagcaacatacatacagccagaggccattaccctaaacaaattaatgcaggaacagaaaaccaaacaccacatgttctcacttataagggggagctaaacactaggtacacattgggccataaatataggaacaacagacactggagactctaaaaaggggaggaaaagagaaggtcaagggttggaaaattatctactcgctactatgttcactatttgggtgacgagttccactgaagcccaaatctcagcatcacacaatatattcatgtaacaaacctgcatatgtacaccctgcagctaaaatgaaaaacagaaagttacgtggagtgagtgtcatccttcgaggcttgattctatgttttgtgaggtggcttcagagcagccctttacatcgggttaatttggctccaccgcaggggccatacccccaccctccacgtctttccactctggacacacttttcccaggcccgttttgctctggggcttttttctacctgctcctttctggggattctttccttggccttgacaacctctttacacaggcgggctggtcaatacccagctccaaaagcaaagcgacgctccacagacctgtctcctctccgttactctgcacccccagttccagcctcttcagtgtccccaaactccacaccgcctcctctcagggaatgggctgggctctggatgctcctgtgcatccagagaccctccatgctagacgctgggccatcgcaggacccccacctgccccttctctctaggaccctgcactgccggcatccgacactgagcagcgctgtttcacacagtatcgattttcagttgttcaggatgggagggtcaatcaggtcccaacatgccatcaagctggattacacaagagatttaaacagtcagaatgccactctgaatttcgctctgttgtccaggctagagcgcaatggtgcgatctctgctcaccgcaatctccacctaccgcattcaagcaatcctcctgcctcagcctcccaagtagctgggaatacaagtgcccgccaccatgcccagctaatttttgtatttttagtagagacagggtttcgccatattggccaggctggtctcaaaactcctgacctgaggtgatccgctcaccttggcctcccaaagtgctgggattacaggtgtgagccacaccgcaccyggccaataatacattttagttcaagattagtgagagctaaggagaaatgagaatgctgattgttctgaaattcagtctccacatgaaaaccagctgagggttgagtggaaaatggagaaactttcgcaatcaaatgaaggtaacacttccttcactcaacaatttacagatgttcacagccatccaacacgaagcttagtggctgatcaaaagtagcaggatattttcagggtaaaaactgagactcacgggcagcaccaagaatgtctgcacatctcaaaagacagacagcgtttcctttagggcgctgaggctgaggtcttacacagagaggaggattgccaactggcaaagccctgcttttcaccaactgctcgaacggactggactgcctggctgctgatagggagggagagatccaccagatctattcagatgccatgaacagagaaaataacactgccttcaaacggggacccctaacagatcttgcttaagaatctaacagttcagcatctgcagttgatcactgcttttgagttctgagacatgaacacaccatggaggtgtccacgttgtcaatgactcagccatgctggctccaattactgcaccaccagtgctgttgctgctgttagagtgacatctagaccccagtaccagagagcttcatggttgtttcaaaagggccccgcaaaggaaaatcagcccttacctcctgcactacagagttcctgagtgaccctgcttttattccatcactaggatcattaagccatggcagcacagcttggtgactgtgcggttctcatatgggcaactccatatagcagttctagggagctgcgaggaattaccaaaaaagaccccagatgagagattggggagttcatctacagaagttccaaatcctttttttctttctctccttcctggacacacagctaaaactacagttccaggccccacgtgcctgagcgccacacactggagtgagggggaaggattttgtgctcacccaaactggggccagagccacaccctgggcgcccccatcacactcttctccctttctggtaggttgcagtggagggggagtgggctgaatggtggccttcaaaaagatatgtccacatcccatcccctggagcctgtgaatgtgaacacatttggaaaagggtccttgcagatgcaattaagcaaggaatctcaagatgcgatcatcctggattaaccaggtgagtcctgaatctgatgacagtatctctatcagtcagaaggggagaaggccacgtgaagacggaggcagagactggggtgatgctgccgtagccaaggaacacctccagccacaggacgctggaggaggcgaggaatctcccctagagccttcagggggagcacggcccggctgacgccatgagtttagacttttcaaaactgtgagagaatgcacttctgttgtttccagccaccacacttgtggtaatttgttacggcagccctagaaatgaatgcaggaggttcctccagggtgaacttggaagccataggatggagatggctgacttccagtcagcctgggtccccgaatgacctactcatggcctccccagcagcattatagtagaacaaaaaaaacttctcctgtggctgacacccacttttgagtctgtatattagaaaaattgaaactaatgacaggtttacagtatgtaagtattatttcatctttaagctttattcaatagtaatttctccaaagcaaagcaaataaaacac

SEQ ID NO: 5610 - DNA, 16159 bp, Homo sapiens
gcgtctgctcacaaacagagctgtgcaggcaaattggagtgaggggttgggaatgactgctacagtggtatttatttactgatttttttatgaaaatggctaaatgtgtattttttttcttttatcttttgagaccgagtctcactctgctgcccaggctggagtgcaatggtgcaatctcagctcacctctgcctcccaggctcaagcgattctcctgcctcagcctcccaagtagctgggagtacaggcacacgccaccatgcccagctaatttttgtatttttagtggagacagggtttcaccatgttgaccatgctggtctcgaactcctgatctcaagcaatccacccacctcagcctcctgaagtgttgagattacaggcgtgaaccactgcgcctggtgtgtattttttttttttctgattgcaaaagtaatgcttattttaaagattgagcaacatcaaaagacataagcaaggaagcaaatatctacaatcccaaatatctacaatccccaaagataacccctgctaacatttgactacgtttcccgtgttttccctgtgcatacacatatatgtatttgatacaaaatgtaatactgtacattctactttttaatctttattgccacttagcatcctattacaaacacttttctatagcattaattatagctgtacattattttaaatagaagcatggtattccattttataaatccagtataatttgtataaacattttttgaagaacattgagattattgctgttttattattataaacaaccctgtgataaacttactttccttccttcctcctttctttccttccttccttccttctttcctttcttccttccctccctctctcctcttcctcccttcctcccttccctcttttagtggaatttcagcatcaaaggttctgcattttttggtgtgttcgatacacagctcccccacgggaccatgggggttgtgtacaaaataaataaataaataaataaataaataaataaataaataaagtgatcataagagcctgggcaacatagcaagaccctcatctctacaaaagtgttttaattatctggttgtggtggcacacacctatagtcccagctacatgggaggctgaggcaagaggatcgcttgagcccagcagttcaaggctgcagtgagctatgatcactccactgcactccagcctgggagacagagtgatgtcctgtcctgaaagaaagaaaaataaaggaaagtgggcatctgagcactcatttgaaggaaatcctccggaatcgattcagaaatcctcatgaagkacccagaattccctgctttggagccagccagaccaggatgaactaaaagtgactgaacacttattatctgccaaccactttacatatattaactaattgatcctgatgccaatcctataaactaggtcctacttttattatccttttgcaggtgagaaaactgaggcacagagtgagcatctaagctgcccaagggcacacatctagccagggacagagttgggatttgtaccagctggtttggagctcaagccttccatcatcacaacagcttggagaggtaagtattattatccccgtttttatagataaggatattttgataaatgttaagagatgccacaatttgccagttgactggcattcaggctgcacctgtcacggctttcttcgtggcactgggtgttctgcatagaatagaaaaatgctttcctatcaccacccaagatcacaaactagtaaagaagagccagtatttccatcctggtctgtctgacttcaaagcaaggaattctgggtccttcatgcggattttctgaatccattccggagcgtttccttcagatgagtgctcagacgctcactttccttttttaatttttctttctttcaggacagtacatcactctgtcttccaggctggagtgcagtggagtgatcgtagctcactgcagcctcgaactcctgggctcaagcgaccctcttgcctcagctttccatgtagctgggactataggtgtgtgctagtacatccagataattaaaacatttttgtagagatgggtgtcactacgttgcccaggctcactttatttatttatttagagacaggatctcacttcatcacccaggctggagtgcagtggtgtgatcatagctcattgtagccttgacctttctggcttaagtgatcctcctgcctcaccctccctaatagctgggactacaggcacacaccaccatgcccagctaatttttacttttactttttatttttagagagataggtcttgctatgttgcccaggcttgtcttgaactcctgaactcaagcaatcctcccacattggcctctcaaagtgttgggattacaggcataagccaccatgcctggcctatttatttatttgttaattttttttaaaaaaattgagattgcaggaaataatttttaaatttaattttagttttaaaacggagattgcaggaaacaaatatgctcacttttcaaggtccttctctggcttcctctggagactggagatcagggctgggaggtctgcacctggctaggtcacgtgtctgtcaatgcccctgtatctttaccactgcagccttgacccagtgtctcactgacactactccctgctcctctcatcctagaccacatttggtttccagaactctcacagttgggcatgttttggttgctggtaacagaaaagtcaacttaaactggtcttaacaataaagacaatttattggctcatggaaccgaagaaagtacagagagaagatggcctctgggcatggtttgttcaggactcttggtctgtttctctgattctctcaactctgccttcttctgtgtgttggttttttccttggactgtttttgccatttatggtagcaaaatggctgctgactgcaacaagactatatacttgcttttccacattcattgagcaaacatctgaactttgctctgactggatcatcttgggtcacagactcactccctgagcctgttgctgtggttacgaggacgtcactggggagagaggagaaacctccctctacccctttcctctactttgatcccagatccaagtggattcttctggaggaatgagaagagatgctgaagctggcataaggctgatgcagggacaaaatagatgttcttacagccacattgtgctgttcacatggtctgtgcagaagtcatcatgtttaaaacagagtggtaagaagatgtcacccaaagagatactacattttsccagttgactggcattcgggctgcacctgtcacagctttctttgtggcattaggagctctacatggaatggaaaaatgcttctcagcaggaacattctaggccattttaagagggcacagttataagtgggaagtgaggtatagaagataggttgggtgggctgacttgctggaacattttgaagtgggtaaaattttattctaaactcatctatatgtgctttctccctccttcagtgaaatgctcgtcctactgcgaagtgaaaggttctttccacccttgtcctccagatgcaacttctcctggagaccccagcattgctgttgccctcaccacactcatgcagcagggctgctccccttcactcctcgggctccaggagaccagcctcttccctaacccctcagtgattccttgaaatagactggaatagtgaaccgacttactgagggtttaggaaaagcagaagggaactatacaccaagaagaacttaacacacggtgttaaatatacctgctcttggccctggtctttctcaagggggtgtctcacaggggattccctgtctagcaactgctgcccccttgtggcaaaaactatccttctcccggcctcagggtctttcttgagtataggcaggtgttttgcagtctaggcccccgtcttttttctcctgtgtccccagtgactattttctgcccttggggctgattttccctagatgattaatagagggagtctcccacctcctgggactaccccatctttgactcctttctagtctaggcgttagagcacaatagtccaacatcagtaaaagcaaagcatgagtggctattgtccccttacacttcctgttaccatctatgaatgataaaagagcccaggaggaaagcacaacttagcttaaaaaataggcttgccggctgggcatggtggcttatgcctgtaatcccagtgctttgggaggcaaaggcaggaggatcactagaggctaggagttcaagataagcctgggcagtatatcaggaccctttctctacaaataaataaataactaaataaaaaataaaaataaaaatataatataaaaaaagaaagccagatgtagtggctcttgcctgtagtcccagctattcaggaggttgaggtgggaggattgcttgagcccaggcatttgaggttacactgagctatgatcacaccactgcattctagccttggcaacacagtgagagcctgtctcttaaaaaaagaaaaaaattctttccagtgcagaactgtaggaatccatggcatggtaaatttggcatttgtggtagggcaggatttatacttgcacagactggcattagctccaaacattagaggaaggttggaaagaagcaatgccaggcagaccaactgggctgtgtggaagtgaagctatcaggcataccagtgactttagtgtgtagccaaaagcaatagacactgaatcgtggtggtgacttatggtccatgaatcacaggagaaatgtctcccttcatttattccacaaccattgattgagcacctactatattccctgaaagagaacataaacatgaattgaagaaggttcttgctgtctcatggctcccaagctagaagagggctgacttgtaaatgcctcacagcagggttcatgttatatggagaagtgacgaaggtgccagaagactcaagctaggggacagccattagctgctggaggcagctaaggtgggttcccagagaagccgttctccgttactgagatgggggctgcagtgaccttgaccacagctcttccattcatggactgccccagctctgtggtctctctgctaaccagccagactctgggagtggcctatgccgtcagcctcagggccatttaaaccaactggtcattggcagtgattgtgcgaaagagtggctggcggcaaaggagggtttgtgttccattcaaataccctcaaaaagcctgaaaaataagtagagattgaggccaggccttggagttgtggaaggtggagaacactgggaagccaacctccaaagaagaccaggttggaggcaaaggaggaaggggagctctcgttggcaaaccaacagggaagccaaggatatcccagtaactgctctcacatccttgatgagaatgccttgaatccgagctaggccacctcaaagaagcctgcaaaataagtagagattgagtgcctgctgttcaaacacaactcaagcgcagtcctcctcctctttcccactggattgcccccaagtccctcctatgggggactccttctgaagtctctgctgtaagtcaaatccttcgccctttatacttggtcaggaagttgcaagcttccacaggtgatatactagggaatttaggaataaacaaatggaaataaattcaagaaaaggaaaataataaaaatgatcatccatagagtggagaattcagataatggaccctcaaccccagcttcacacctgggacccccacttggtcatatggaccctggcagtctctaatcacaagtctgtgatcccttgacttaaactgttcttccccaaatgtagacatgggtggggctcagaagggaggtgtcatctgatgtggtttccttatttccgtttattcatcaagtgccctctagctgttaagtcactctgatctctgactgcagctcctactgttggacacacctggccggtgcttcaggtaggaagccacctctgtttgctaggactttctgtggggtagggctgcttggcttgactttattttggaaaatgtattcatttctgtgggagctgaggatttctgctgcccgcttcctctcttgtgaccascactcatacatggagttagcaggtgaagaggacagcctcctcatcccctctttttataccttscccttttgtgggaagaggctgaccattccccaatttgatgtttattgcttcaccttaagactttgtcttcagtgaaaatgcaaatactggtagggagggaacacactaaaatgtgtggatctgagtggactcatcatacaccctcaggcctggcagcaaatgagaggtggatgattctgtcttcctcgatttgcagatgagaagactgaaatctataggggtacgagaccccactcaaggtcatgagacttatttatttatttatttatttattttgagatggagtctcactctgtcgcctaggctgtagtactgtggcacgatctcggctcactgcaacctccatttcccgggttcaagtgattctcctgcctcagcctcctgagtagttgggattacaggtgcacgccaccacacccagctaatttttttgtatttttagtagagacggggtttcatcattttggtcaggctggtctcgaactcctgacttcatgatctgcctgccttggcctcccaaagggctgggattacacacgaaacttattaatggtagaatcaggatggaatgaagactggatgctaggtgtctttacaaccaacctcggtgactttccaaaggctttcagacttctctggagagtcctggagctttgaggggctctttaggggccatctgggttcggagattagcacactctgccccacagtggctcarcttttatctgcttcacatactgggcttctgggaagatcttatttcagtaaactatttcacaataggaaawatatttgaaaactcttgaatgattctgtggattttttcaggggtggagggtttcagggaccaagatggagactttatcttctcaaatacttaaaactcctttagacagaggaacaaaatatgtgctcctcatttaaagaaggcttaaaatatacagtttaatgcaatgtgttgttatcacttccttcccccagtagattttaaggagggtaaacaagaatcagggagaacataggaatagaaatagtagaaggggacacctgggaacaggtttgccttcttgcattttgcttaatgctggcccttccctgaatgtctaagaccaacctggtccccacatccaaatgcacagacacagctgaggatggagaaggctaaagagggacagaggtagagacayaggctgagaggaggcagttgtaggttgagctagggctaaggtgttttccccatattccatcttaccccacactcaggccaggccttagagttgtggaaggtggagaacactgggaagccaacctccgaagaagaccaggttggagtcaaaggaggaaggagagctctcattgycaaaccaacagggaagccaaggatatcccagtaactgctctcacatcattgatgagaatgccttgaatccgagctactaaatcacatttccttccttctaaccttccagttagatcaaaccattgctgaaactgaagaggacatgtcaaatattacagatccacagatgtgggattttgatgatctaaatttcactggcatgccacctgcagatgaagattacagcccctgtakgctagaaactgagacactcaacaagtatgttgtgatcatcgcctatgccctrgtrttcctgctgagcctgctgggaaactccctsgtgatgctggtcatcttatacagcagggtcggccgctccgtcactgatgtctacctgctgaacctggccttggccgacctactctttgccctgaccttgcccatctgggcygcctccaaggtgaatggctggatttttggcacattcctgtgcaaggtggtctcactcctgaaggaagtcaacttctayagtggcatcctgctrytggcctgcatcagtgtggaccgttacctggccattgtccatgccacacgcacactgacccagaagcgtcacttggtcaagtttgtttgtcttggctgctggggactgtctatgaatctgtccctgcccttcttccttttccgccaggcttaccatccaaacaattccagtccagtttgctatgaggtcctgggaaatgacacagcaaaatggcggatggtgttgcggatcctgcctcacacctttggcttcatcgtgccgctgtttgtcatgctgttctgctatggattcaccctgcgtacactgtttaaggcccacatggggcagaagcaccgagccatgagggtcatctttgctgtcgtcctcatcttcctgctttgctggctgccctacaacctggtcctgctggcagacaccctcmtgaggacccaggtgatccaggagasctgtgagcgccgcaacaacatcggccgggccctggatgccactgagattctgggatttctccatagctgcctcaaccccatcatctacgccttcatcggccaaaattttcgccatggattcctcaagatcctggctatgcatggcctggtcagcaaggagttcttggcacgtcatcgtgttacctcctacacttcttcgtctgtcaatgtctcttccaacctctgaaaaccatcgatgaaggaatatctcttctcagaaggaaagaataaccaacaccctgaggttgtgtgtggaaggtgatctggctctggacaggcactatctgggttttggggggacgctataggatgtggggaagttaggaactggtgtcttcaggggccacaccaaccttctgaggagctgttgaggtacctccaaggaccggcctttgcacctccatggaaacgaagcaccatcattcccgttgaacgtcacatctttaacccactaactggctaattagcatggccacatctgagccccgaatctgacattagatgagagaacagggctgaagctgtgtcctcatgagggctggatgctctcgttgaccctcacaggagcatctcctcaactctgagtgttaagcgttgagccaccaagctggtggctctgtgtgctctgatccgagctcaggggggtggttttcccatctcaggtgtgttgcagtgtctgctggagacattgaggcaggcactgccaaaacatcaacctgccagctggccttgtgaggagctggaaacacatgttccccttgggggtggtggatgaacaaagagaaagagggtttggaagccagatctatgccacaagaaccccctttacccccatgaccaacatcgcagacacatgtgctggccacctgctgagccccaagtggaacgagacaagcagcccttagcccttcccctctgcagcttccaggctggcrtgcagcatcagcatccctagaaagccatgtgcagccaccagtccattgggcaggcagatgttcctaataaagcttctgttccgtgcttgtccctgtggaagtatcttggttgtgacagagtcaagggtgtgtgcagcattgttggctgttcctgcagtagaatgggggcagcacctcctaagaaggcacctctctgggttgaagggcagtgttccctggggctttaactcctgctagaacagtctcttgaggcacagaaactcctgttcatgcccatacccctggccaaggaagatccctttgtccacaagtaaaaggaaatsctcctccagggagtctcagcttmaccctgaggtgagcatcatcttctgggttaggccttgcctaggcatagccctgcctcaagctatgtgagctcaccagtccctccccaaatgctttccatgagttgcagttttttcctagtctgttttccctccttggagacagggccctgtcggtttrttcactgtatgtccttggtgcctggagcctactaaatgctcaataaataatgatcacaggaatgaaygcatgctgaaaagaccactcttttgcacaccatctgctcaaagctcctcttgtctgtcctgtccgctttcagcctccgtctgtccacttattaagtttgcctttgtggtttagcttcattagatgtttatctgtgtaaaaatgtcccaagtgaggacttaagatgtcagggctcttctgatggcaaatgatagaaagagaagtcaaactagcttaagcaaaactgagagtgtgggtttagcctgtgtggggaaggatcagggaaggcttgaggttgggaatagggtgaggctcagagacaggacctagatcaagcttcagatggggatcagtgattgatgttgaaatcaaagctgggatgggggcagggatggggtggcagcttgggatgaggtcagagaaggatgaatgccaggaatcggtagagatctacaaggagggagagtgagagtcagggtcacagtgaggtgttgggaacagggagattcaacatggagctgggaccagatatggagagtgagactttggaatgggataagtgtgggggagtggtgaggctcagggagggggtgtcaggcctggaatgaatatcagggaaggcttagtagctataaggctggagcagaagacgtgcctggtagggtcaccatcctatctggagcatcatctaagatcttcttccggggccaaaagacagaggctcctcagtctgtcctgcttaagactctccaggcaggtgagtgaggagggagttaggcactcgagccctaagagatagacctgattcagcagagaagacaagaaggatgcaaaggatgcacagagaatctagggcagaaggctgagaactggggcctccttttcctctcctccctccgctgatctccctccacctctcctactgtttcctcaaagtccaacttcctccttcttcaccttatgcttctgcaaggacaactccatcagaggcttcagtaagtaaatagggatccacactgggtccaggggaaatgcaaatgactcataacctcatgaaaaatgctcagtctcactaggaactaaatgaggctcaaacagcaacaaaataactcagaagtgttttaaacaggggagggatatagtggactcttcaaacaagtgcaacatttttcgattggattttttttttttttttaatgagacagggtcttgctctgtcacccaggctggagtgcagtggtgcatacacagctcactgcagcctcaaccttctgagttcaggtgatcctccaacctcagtttccagagtagctgggaccagagctgtgcgccattatgcccagataatttttaaaattttttgtagatatggagtcttgccacgttgcccaggctggtcttggacccctgagctcaagtgatctgcctgcttcggcctcctaaagtgctgggattacaggtgtgagccactgcacccaggctgattggaaattttaatgcagcctgtaattttctgggtatagctcaagacacaaatgatttggatttcagatttttaaaaaatgtcaggattttggtacttagttaacagcatattgaagtaccaaaaactgatatttcaattactagatagggtgaggattagatccagtcagagccagggagagtgtttgccttaaggagggactcccttgtccaggatggggctggcactagggatggggtgaatcttaggacaggagtgggggtcagaaatgggaggggtcagtgatgagattgggattacagaggggatgtacatcagggtaaggtgagggacggggattaggatgtaacggcatgttctgcacaatgcttcctgatgttaaaatcctaaagtttgttttgtagccttggtgacaacgtttgagactctaaatcaaaatgtgaaaatctactgttttcccctaaaccagttccacttctgaccaaccacagcctctcaccaccccttgccctccatcccctggcccattcttgttaattccagcaaaaatactaattgacaatcaacattttatgccatagaggtaaaatttgcccctttctcagcaaagtagtattttaataagagtctttcagagactgaaaaatctcatagatgcaaatgagtaacatgacaatctcctctttggtctaaggatcgtcccaaagaggtgccttcctagagaagaccactcaccaagagacagtggtggagccctgtcttttgccgtttccatgcagaggtcagagaggccactctaggttccacccagaaagccacaaggagctaacggcggagctctcagcaccaatgttttcttgcagcctggtattcagtttttaaatccaaagtcttccttccaaccttcagggtagaaatgaatcaaagacataataaataaaaaataatcgaaatatgttaactcgactttttaagattaaattttctttctattgtctaagtattttatacacattgttgaaaaaacgaaatggctttatgaagcttataacaaaaaaccagcagccttccagctccaatccctgcagacaagggcagcagctgtcagctctcatagctgtttcatcggatagtgatctatatatttctaaatatcatacttgttctgctagtttttttcttttttttggtctcactcagtctcccaggctggagtgcagtggcatgatctcagctcactgcaacctccgcctccctggtttaagtcattctcccacctcagcctcctgagtagctgggactataggtgcccgccattacgcctggctaattattgcattttttggtagagacagggtttcaccatgttggccaggctaatcttgaactcctgacctcaagtgatccccccacctcagcctcccaaagtgctgggattacaagtgtgagccactgtgaccagccctctgctagttcttgtttttctccccctccaggtttagctatcatcactgactctctcttttggctttgagaatgtaatattctcccagtccctctcctgctttcaccccaatccaagcaaacacaaatactgccttctccattctccagaaacagatgccacattttttggttaagtcgacattcaatttttttgttattatgactatgtaaaaaattattcacagtaggatccaattttttttgtacaagttttgttttccctggaattgatgagaggatgttccatgtacttatcatgacatcagttccaatgtctccctcaatacattcacactcagcggataatctattaatttttctttctcaaagacctctctccgggagtccttcattgtcttcttccaacctggacaggtgactcttaggaaaggggccagttcctctttactaaattgctttgactatgtttccagagaaattttagaatctgcttatcaatttctatataatgtccagctgggattttgatttggattatgtagaattcatagatcaatttagagaaaattgacattgtcatattgagtcttccagtccatgggcacgatatctttctctatttatgtcttctttaatttttttgcaaaggatgttttatagttcttggtacacaaatcttgtacatactttgcaaaatttgtccctaagtattttatgggttttttggatgcgattacaaatgatatcttaaaaagttttcattttccagttctttttttggttaccatagtatatagaaatacagttgcagtatgtatattgaccttgtaacttgggacctaagtaaattcatttattggttctagtagatttttttaaagattgctttggattttaactgtatgccatcatttcagaatttaaatcttctttttagttttagaatgcatgatgtgtaccttggtggtgtttttcttcattcattgtgctgggcgcctggtaaattttcttaatctggaaatttaggttatgtaaatttatctggtattagttctttgacagtgttccacccttcgttttccttattctttaatttttttaaaagaattattctattttattttatttttgagacaggatctcactgtatcacctatgctggaatgcagtggcccaatctcagctcactgcagccttgacctcccaggctcaaggaatcctcctacctcagcctattaagtagctgggactacaggtgtgtgccaccatgcctgcctggctagttttaaatttttaaatagagtcggggtctccctatgtcacccaggctggtctccaactcctgggcccaagtgrtcccctctccttgtcttccaaagtgctaggattacaggttgagtcactgcaccctgcctatttaaaaaaaaaaaattaaaaaatcctcctgcctcagcctcctgagtagctggggctacaggcatgcaacaccacctttggctaattaaaaaaaaatttgtagagacagaatcttactatgttgcccaggctcgtcttgaactcctaggctcaagcagtccttcttccttggcctcccaaatttccggaatttcaggcatgagccaccaagcttgacctatttaaaaaaaaaaatttaggggctgggtgcggtggctcacgcctataattcctgccctttgggaatccagggcgggaggatcatttgagtcaaggagttcaaggccagcccgggcaacatggtgaaaccccatctccacaaaaaaatacacacatgcacaaaattagctgggcatggtggaatgcacctactctgggggctaaggtgggaggattgtttgatcctgggaggcagaggttgcagtgagccaagattgcaccactgccttccagcctgggcaacagagtgagaccttgtctcaaaaaaaaaatcctccttccttagcccccaggtagctcggactacaggcacgcaacaccatctctggctaatgtttaaaatattttttggagagatggagtctcactatgttgcccaggctggtcttgatcccctggcctcaagtgattctcccacctctgcctctcgaagtgttgggattataggtgtgagtcactgtgcgtggcaaaaaatatacttattttaaagtcagatccaaattgctttattatctttagctcctcaggtgtgaattctcccatttgctgttgactgactgttgattgtgatgattgtcagctctttgtaacattttattgttaattcatcttttgaaggcatttttttgtttcatgggagtcttgcatgtgccctggattatgaagaagtctattcaggggtggctttatggctgtacctgctagggccttactgggttacatagctcagagcattttttgttattgatatttcttggccctgagtttccacaccattgcaaatgacagatttgggtcctcatcacttgatactagggcttgggattctggaatgttcctcaattggccccttttctctcatgacctaggaaggcagctcacttgggggttgtgtctcaggctgcaaagtgcttttctatccccattcaagggcatggcagctctttcttggtcctgacaattttataggcaatcaagttgtagtttctgctatacatggggcctttagggtcactggtattatcattcccatccttaaggtacatgatcaattctagtatctttctgggttcctctggctttaatcctactccctgataagtccatacatttttaagctccctcttcatttctggcccttggagattttttctctctctcttgcctgctattgacctcagatatttatttttaaaaattaattaattcattcatttatttttgagacagagtctcactctatttctcaggctggagtgcagtggcgtgatctcagcttactgcaacctctccctcccgggttcaagcaattctcctgcctcagcctcctaagtagctgggattacaggcacccaccaccatgccagctaattttggtatttttagtagagacggggttttgtcatgttggccaggct

SEQ ID NO: 5611 - DNA, 253861 bp, Homo sapiens
aaggtctcagccaggcgaaaaggctgggaatcaattctccaacagccacatatgatgcaagagtccactcgcaacaaagcctacgacacaccaaatatcagaaacgaaagtctctgagaacttgtgcaaataagaaacgtatttgcattggcaaggatataaaatttaagtaacaaatagaagaagacaggatcttctgcaagttacagacagtaatatttatggacatttctaagaaagcttgtaatgagtattttctacactcagaaacacttttttgagtctacgtaaagaaaacacttcaagagagataggaaaatggggtcttcccactctttatttatttattgagaaagactctcgctccattgcccaggctggagtgcaatggcacaatctcagctgactgcaacctccgcctcctgggttcaagcaattctcctgcctcagcctcccaagtagctgggattacaggcaccaccaccacgcccagctatttttttttttttttgtatttttagtagagatggggtttcgccatgttagccaggttggtctcgaactcctgatccacccgcctcagccttccaaagtgctgggattacaggtgtgagccactgtgcctacccaagtcttcccattctagctgaagaaagcataggcatgttagaagtatgaactgccactaaaaaaaaaaaggagaagaaaaaattccatcttgaatcagacccatggtctagtgagtctatgcttctttcacttcccccaccctgtaaagtcagggacagggattaagattttgtcatttcgacaaacccagaacctgccacagggcctgacacacagcaggtcctgcataaatgtttgctgaatgaatgcgttaaagatgggccctcgtctgtcaagaggtggaacatttgagttcatgtgggtgaagggcgcagggcggtgcacagcacaaagtcaatatggcctaagtcacagtgatcaccgtgaccctcaagcatctgggtttcttttataggaaaaataaagatctgcctatactgtaggtttttcttttcttttttcccccaaaagagaatagctatatgaaatggaactcttgcgagtttgggcctttcaagttcacatcccatcggtggttatataaagtctactgccattattctgaagcccgtctttgacaccaacccaaagtccttgaattgtcatcaataagactaccagaaagcacaggcgaattacacgttcagagaacaataagaaatgctcacatatcacaccctcttgatcatcactactttgctccacacaaacctcaaaggtggttccccaagactggtctctatgggaggaagggagagagagagagatgaagaaatataaaacataaaatacaaagaatctgagcccctgtaacttacagaaagcaccaaattgtcttttgtaggaaaatgatgtttaatgcatggtgaggcagaccctggcttgtggtgggcgaggagmctccccttggaggaggctcttggtgaaccacctctgggtgctcccttgcccagcctgctgccttgtttaggaatggatcttggttaacggcaaaggttatctttcatacttggggatactttccaagaggcacagctgcagcccctgaaactctgccccagcagtttatttccacatttttcaagtagcacagaaagtgccactatagaagagaaattctctacctgaaaccagcagaagctcaatgcaaataaagaatctggaaaggtcacagagggagtaaaaagaaggttctttcttctatggctatagggggtttattgttgctggtgcccaaactggaaagggaatcgcaggagattaataattgaaatgttgctattattggttttcgaaactatttgtgggttattctttccctggagtcatcatgtctgtaagcatctcagaagatagagggatttaacacactctgagaagatgcctactacagccagggactttacgtgcactagtttctaatggagttcctgcacagtccaataaagcccaaagtcgtatcactagattcaaactcaggtttctctgattcaagtatcatagcacattgtctgaaatcaaggataaaattaaggcaccttactcactactcaaatgtggcgagaagaaaagcaacatttatacttactcatttttaaaatataaaacctaaacacaggaacagatattttagggcatgtgtcatcaaactctgctaacccaagatgattcagaatctcatttcttggtagacagcttggtagataggcatcttcaggtccatctgatgatgaattgcagcagacagtttttggaagtctgtgaagtgttcctttacataagccaatagtaatcaacacagcatatctcagggagaggaaaacataaataacttggaatttaggctcctctcattcagaacccataatagagaccttggtggttggcctttgcactagatattgaaaaagcctcgcaaagcaagttgatggaggaaatacaatcacaaggcaaatgtttaaccttctaaagaaaataaacctttttataagaagttcagttccaaaccaccaaaaactaacatgctatttataaacctatccttcaagcaagccctggaagactgattctctttgccacccattaattggtattatcaaataccccttgtttcaaaaacagcatttctgtctaaatctctggcggttcagaacgctccattaatgtatctgggccttcacctggtattccaacttggtgcagcagcaccccattgaaacaattccctctcgtgtcgttatacttttcctgagaagaatcatgcacactctttaggagctcaaaacccacaaggaatccctcttcttatagaaatctacaggaaaagctctgctcgtttagcatgcacacagggagtccatgtgctctgattgagacaggggaaaaatcaggtttcctgaacccagaggatgtcaccacggcaggagaaaggaggtcatcagagtcttggcacactcatcacagtgagtgaatgcgggtcctagcaacctaatccttgattctagaagtcacctgtctgttttagagcatgtccaacaatctctttcaaaaacacccagatctgggcttttggcagactgatgtgggccagttgaggtgggatggggaggaagattagaaaaataattataaaggtgcacagataaacatccggaataaaagggtgcacagcgcaggaacaatgaagagggcacacggacaagatggagggaaactgagggctgaaagaggccaccgcggaggtcacctgagacagggaaggaaggctggcaaataaaaacagttcatgagacttttgagatccatgattattcttaaaccgtaacaccctacacacctgcagttctttatctggcgtaaggaactggaagaacaatgtagcaggaacggggagagccaagtctcagcctcgggggcatggcctaccttccatatggatttaaaatgaaaggagcaggaggagaacagtgcagttcccaagatggctttccacaaagttgacaaaatacaccccaactcacatacccggtccctagtaacagggaaaccagccgtttactatagttctgaattcaatgccaagttccttctctcaactcaccgggagtgtccagcagagggagtctcaaggaggtacttaataaagagaaaattgtttcattttaacactctagacagtgggagcattgactgtagccccctcctgtagacgcagatgaacaatgaacgcccgacatgggttctcccgcatgttcacatgtccaccggcatgttctattctgcgtggtggagtgatcagaaatttcgttttgttttgtcgaatggttaaatggaccttgtgttcttcagaatcaaagaggaaagcccctggaataacatctctctgttgccttctaaacagcccctttgtttctaagagagtctgaaaaaaaaatatttacagtctataggttatttacagcctcgttatccagggcctgactggtaactttattccggccagaaacctaattcatttggagccctgaaactaataacagattttcttttaagtttttttttttttaatcagcctcttataacagagataaaactattaatgccttccctgtctcactggccacaactgttctccggatttacaggaggattacattcccccctcgtgccctcctctgtgccacacaaaccctgtcccctctcatttgcgatttcatccacagaatatctgaacaaaaccgaaagaaagccgggggacccacgctaaaagtatgtgaaggctgcgatttcaatgatttcatgagacaaacatttacacgatgaaacgactgaaaaatcagacacacttgggtttaaaatttctcctactacaagcacacaaaaacacatcgaagtgtaaaaacttagttgattctgggttgctttctggctggaagctgacagaacggactgaagagaaacgaaagacagtgtgcgaggcagacctactgcttttctgccttgcgttcttttctttcttgctaaaggcagtcaaatggggaaaaataccccgatgccaggtgaaggtgcacaacacagatcgacccagaccgagccagaaaaacgtctccgccgctcccccggctggaaaacccaaagtccacgtccccttccacacgctaatgaggggagattttcgcctatttcattgttctgcctggctctgacatggacttttcatctctctcctctctccccacctagccccgtgcattccgattccacagcccccccaaaatcggaggctcgcggagaataaaggagcgtggggtgggcgcggaaagaaatgggaaggggcgcggggcggagagcgaagtggaaaggaggtgctccgaaaggtaatgtgggggggcggtggaagctaagccgcatcaccttcatttatcgcaaataaataaaaagcacagtcaccggtccgccttccccggcgtccctgccctccccgggcagccgcccaccctcgcacacgccccctcccctcctgcgcccccggcccctctccccgccctggaagcaagaccctgccggcgccgggtcccggtcatcttccgggcgagggagggggtcgcggccccctcgggccccgggtgggggctggggcaggcgccgggggctgcgggcgcggggccgcgggcagaacaaagctgcgggggccgcggagggcggcgggcgcggggtcggcggggccgggcgccccttaccttcgtacacgggggccatcggggccggggtgtccgcggttcatggcaacggggacgggaaagcggcgcgcgagctcggcccccccagcctcagtcggaatctgccatcttgagcctgtgtctccgctctcggcgcagccgaggccgcccgcgcccgcatcaccgcctcccgtggccggcgccgggggagggggccgggcgcgccgccgccgccgccgccgccgctgccgcccgggcccggcgcggggggctcggggctcggggctcggggcggccgggcgggcggagcggccgaggccgaggcgccgagcggccgcggcccccgagcggatccgcggaggggcgggagccgggggcagcgcgcggccagggccggcggggctcagctcagcatggctgggcgcgggggctccgcaaaagttgctggcggaggggggcggcgggcgggggcgggggcggggcgcggggccgggagagccacagggagtccgcgcgcaatcgagcgccgatggcacggatgcgaggcggggaaggccgaaccgaagggcagagccgcgccggcggcccgaggggaccgcgctgggaggggctgccgcgcagcgcggggggactgggcgcagggcgggccccgggtagtgggtgagagggccggcctggacccggcgggcgcacggctccgagyccagcgcagccgagccggtctgcagaggggcccccagaactttgtgtgtgtgtgtgcacgcgcgcgcgtgtgtgcccaggtgcgagggtkcgcgcgtgtgctggcggggagggaaccgacccgaaagagagccccacgctggcaaagtggctcgcccatctcacagccggttggcgctcgcggaggtaggagtggaatgaatgaatgaaggagtgggcgcgcgccgtgctccggaggagggcgggtgagtggaggagcttcggaaagccacacgaggtcagaggcaccgaagccctgccgtgcacgccgcggaaatgcagcccccggggtggtcgctgggttcctgccggagtctggcttccacgccaccctgatcttctcctcctcgcgtctacactgtcycgagggccgccactccatcacttgaatgggagctcacaactctctgggtcctcgcttttctcagcgctctctcctatcagggcttccgctaaacactctccagactctccccagccgggagcctctccaggtttgcttctccagctgcctcccggatgcttggataggatgccctgccatcccctccaacttaggaagacttgttgagtctcctcttaggcactgtttttaaaactgtgggtcgtgacacagtaatagatcataaaataaatgcagcggaaggcaaccagctttcaaaaagaacgaaatggaatccaatagaaaatattagagtccattgcccttagtaagggcaactattgtttcataaaccttttgtttcgattataggtactggacaagtgtactggaccatgatgtcaattttatttccgtctgtgaatcgtgggtttaaaaaagttgaaaagctatctgtgtaaaataatgatctctaacactgtataactttcttaaaaacaacctcgtgattttctcactacttcttatcctttccggtctccatcctccgttcccatccttcagtccttcccaaaaaaggcaagctctttcacacttttttagtggtacatcacgacaccttcctctgtgtgatcttgtactctgcggtcttccttgcccccataatcaatgctacacttcctatcccttctcttaacctaatgccattcacgtttgcagaatcctagactactgttgctaaaaggacctcagaggtcatctgggccagccctgcccttttagagttgaagaaatggagtccagagaagtaaaatctgttgcccaatgtcacacagtattgaagcttaggaataggtctcgtggctcccactctagtgttttttgctccacaccggtcatttatctccttcccttctatyctccctgcaatctttaactttagtcttggcccaggtcatcctaaatattgccatcttcataatacgtggttctggccatgccacgctcctggctaacatcctctaaggactcaacctctgcaggtggggctgagtgccttggcttttcatcaaggcaggcgagtcctgacttagctttctaaggacatgagttcagcaagtcactgcttctctagccaaactggtttacttgtagcccagtgccagcttcacccatctctgtcactgtgcctttgcccaagcggtcactttcccacccactttcccagaggggtaccttctccatcttctctctttaagcagattctacctgtgcctggctcacctcctmcacaaaacagcccgagatagcgtgggagtaagtcagacctaggttcaaatcctagctcttccacttaactatgtgatcttggtcaaaatgcttaacctctctgagcctcagtgtctgtattttgattatgagaaggagaacaatagtaatgttctccttttgcatctgtaaatctctatcatagccttcaccacacaggtatgtaactccctgttaatacataccctacatgcatgtctctctgcccctttctagtgctggccattagaacttgctgccataatggcagtgtagctacttatgtctgtggagcacatgaaatgtggctagtatgactgaggaactgaatttttaattttaataaccatgggtggttagtggctaccattttggacaaggtgtctctagactgtaagctcagtaaggacagaaaccatgtttttcttgttttggattgtatgtccaataactgcattgcctaacgcatggtgagtactgcacacatatttgttgaatggatgatagctgcaatttgttgcatgctcccttgtgtccagcacaacactacaaactcgataaaaggcatttcatatagtcctcatcacagcctctgaggctgggttagattagagagagagttttatatagagggcagacacatagtaggggttcaataaaagttattattattctaactcctccctctgaccagccccactgacttttgtctcatctttccttaggctcacagaacatttcctgcctgttgctcacactctgttgtccacagcatacccgcaccctagatggctgactcttgtcttctgtgtaggtaccctgtgttcataactggattggcagcgtcttggagcaaggccctgctttataggactgcccctgaattcagcactgaccagtgttcagtaactgcctctaagtccatcccagctgctgtctagcagtgagtgattctaggcagtcttaaaatgaatatcacttgtgtcaaccgaaaacattttacaggtagtctcctccccataagaagggaacaatcttgggcaaggaaatagagtcccatggaaggggaacaagatggagccatacagacagaggtccaccttctcttcagaccaccatgactgaagctgtatccatgagatgcaaaacatgcattcaattgagctagcgaagttcgtatgatataacggaaaaatattcttgaaatgagcttagattttccttcatgaattggcagactgagtatactaattgtctcctttccttccggtgactgcagtcaagtggcagcaaggtataaacctaacagtgaaatgtcactgaaggagagcatgggagctgggaggagagaggatctgtgacagaacctggggagtaccagtatttgagacatgggaagaggaaaaagagctccccatggacaagagggcagagaagttggaggacagccaggacgggggattcctcaacatcccagcaaggtcaacagtgctgcatgctattgagaggcccacgtcagatgaaagcagaaaagcagctgggtgctgtggctcacgcctgtaatcccagcactttgggaggctgaggcaggcagatcacctgaggtcaagagtttgagaccagcctggccaacatgatgaaactccatctctactaaaaacacaaaaaaaattagccagacgtggcggtgggcacctgtaatcccagctacttgggaggctgagataggataatcgcttgaacccaggaggcagaggttgcagtgagccgagttytagtgccattgcactctagcctaggcaacaagagctaaattccatctcaaaaaaaaaaaaaaaaaaaaaaaggcagaaaggcatcaattggatttagcaacaagagttgcattagtgactttggtgaaactagtttggagggaaatacaggtttcttaaattctacctgaatatgtgtcctgttttatgggtggagatagtagaaggatggggagggctaaggaggtaccagaaaagagcaccagagattgctccaagcagagagggccttaccagtcatgggcctgagacaatgagaggggtctgggagctgtcccatttggctagagatagtgtgcattgtattttatttatttaataagcacaytagcagtcagtgttctaaggagtttaatcaatcatttaaaaaaatcacttttttttttttttaacagtacatggaactctaggttgccaaaataccatttaacttcagggtgcattgaagaacaataataaaggcaagaaaactggaaaggatttagtaaccatttataccagttacctctccttaatttgcctttctacaaaatggtgcaagtcatatctttctcaggagttggtagagtgaacatgggggagctttgacctcatttcaagttcattttgcttacaggacatggaacaaagggtcttttttttttcatgtatgcctatagttgtgaaactgcacaacatcacaatatcttcaaggccacaggatagagataaccctctttttggtgtatgcatttaggtgtgtatgtctctcttactctcagggtattcttagcatgatgtctgtgtggcttgtatcttattctcacttggtgtgtgttgctcttattttcctgacagctctttattttccatgtgtgagcctgtgcctgtggtttatctctggaggatgtgcctgagggaggtaggtcactatctcaagttctgtcttttgatatcacacctctcttttggtctcttgctgtatctctattttcctctctttctgactgtgtgtctaattttctttttctctgtatctttctatcttttccacacattctttatttcttcttcctctccctttattttaattctgtttcttaacaagtcataatagagacctatttttgtttggattattcttaagaaattaccttgtctttctgctttaaacctttgatcggtttcaatgatacagtttgtaacagagtagtatttaataacaaaactctttaactgaaagcttcagtaacaagacattacactcacagagaatttaaaagagtagacatttcattcaaatgaggaacaatagagctgtggctttaagggcaaaggggagagcgaggcttggcagggtgaagggaatctgattgtggaaatggcagtcttggagaaattacactggcaaaatcaggggaatagggaaacatcattcatttttctgcttttgctcctagaagaaaaatgatcagacacctgaacaggggtgcaggaaaagcaaagcgatgccataagagcattgagcagaaaggaaatatggcaaaaaaaaaaaaaatgcaatcagcctatgaatgaaaagaagctgtaatgtagatgcacagaaggtagggcgattttgttggaggttgcgggaatggcagattaggatggatttgcacatgagaagcagttcagagaagcaacccaaccctgcagagaaatttctgtgattatgggaggtaggtaatagcttggttttcctgacctgcagtccaggctgaacttggacagactaggtagaaatggtgcagaaagaagcttggggtggaggcagaaataaaggtagactgaggagagctcttttaaaagcctgcaggtcctgttaagcctacctcagccatgaatcagtggacctgtgcatttctgtacagtgtgaagtttcaattgtaaggtttcctcccactgacatgaaagagcttgctcctatctggcaacccctggaggggcttgactgtcacggcagagggcagttaggactgactctttgctctgaggttgccagtggcttcttagattgcaaatcgcatgccctttcttagcccctcccctgcttgatctctaagcaaacatgagttagttagacactgttaatcacctcactcttcttgaatcactcccctcccttcacatccttcacatgcatgcttgtttagttttttttgttttttttttttttgtwttttttcccaaaattcctagtccttcctcctttcacatgcttgtttaggtttttgtttttgtttttgttttcaatactcctagcctgccttcctgccttcctgcctgcctgcctgcctgccttcccccttccctccctccctcccttctttctctttctttctttccttctttcgtttgttctttctttcattctttctctctctctctctcttccttccttccttccttcctttctttcttcctttctttttttcctgagaaaatcaattcatcaaatgttcagctacagcttactatgtgctagattctgtagcaggacctgggagtataaaagggaataagccatagccctggctttcaaggagctcaagttcaaagaaaaaccaccaagcaaggagcatgatacaatataatgagtgcagcagtaaaaaggatgcacatggtcaaaagatagtacagagggacaaatggcaaggagtgtgtttggggcaggggaggtggcacgtctgtgcctggcactgcgagttctggcaggtgacagcaaataggatagaaagatatgaatgtctaggatatgtaagaaattataatattgctaaacatgcaaagcaaggccgagacagtggtcaggaatgacgctggagattgtatgccaagctgaagaacttatactttattctgaatgcaccagatgtggggaaaaatgaattcaattttgaacatgttgagtctaaagtacctatgagatattcagatagggatgctcagttgccaggtgggtgtacaggactggagctcagccaagggtttttaataggagatagagattgttttgagtcatcagtaagtgtataatgcgtggctgatccataggaggtgagatcacacagggagaggttacatggcagcatttctcaaagtgtggtccttgggctgcctgcatcgaaggggctttctaaggatgcagactcctcaggcagaaccccaaacccactgactcaggaatctctgggggtggcacctggaaatctgcattttgaatttactccctaggggatacatttacacaaagcagttccataactacaggtgtggagagagaggctaagaggctaaaggagggaactaagaagagagagacctgatcatttaggggccgtgtccttctcccttcaccctgtttcttgatggactggacctaagctctcttctgttccctttctgcttgttctcttggcaagctgatctctagatctctgaggctggtatttgaattgacatagtctcattagctcttgtcccacatttccacctgctttccagacactgctaccaaatggaactcatctcctcccaaacctccttctggtaaacaataaccacctcctagtccttcagctccagccattgcaggtcaactgccaggacccattgtttckttgttgttgttgttgttgttttttgtgtgatagcttttcacattcttccattcctcttcctttctactgccagtacctgattgagcctatccctacctcctccttggactgctgcgctatttttttaacagatgtccctgactccagtctctccctcgtctttaattcacataactgattgttgacaacattggcttcctgcgcactgcataccattgctcagagatgttcggagtcaccatattactgcacaacaaccttcatcaccttaacctgacacctaaatcccatcatgatctgcccaaaatccccttcccaatctcatctcccactcttgcatctcgtgcatcctaagcaatagctgcacagctttgtctttgtacatgccagcctctgcccagagtgtcctgaactccacgtcttccccatcctttaagacccagttcacatgctatttccttcatgaagcctttcctattccccagcccacatccccagaggtcatttatcctttattctccccaaagcatattttaggtctgtttctgctgcattcattttttcctatctagtattagagggttttttttttgtttgtttgttttttgtttttttaatgtctcgcctttccctctatgggagcaatgaaagagggactgaccatcaggaacattaggtccatcacttttaactggatgatgataagggaaatgatttcatttctctgcacctcagttttctcatctatagagtgagataataatgtctgcctcatcagtagaaattattcatgtgaaggaaggggaagataaactatacaaggcaacaaaacaccgtagtgtcaggtatgaaggagacacttaataaatctgtactgaatccatgagaaagggtatacttctagacagctttgaaccgttctgggaatataataattaagtgatagaatgcaaggaagaatttagttttgggattacctgtttttattttagtgaaaagtttcacagatagaccttttacttccaacaacttcaaggcttaattttattttttaagcctagggttcttttttctttctttctttttattttattttttcatataatcctgaagcttttcactctatgtggaagacacacgtggttgcctgctgcctatctctggtgccttcttcctcagttgtagaactctgattttatttaggcagtactgtacctgcccaagaaagtaaattatgattggtttaagtcagttgcagcaaatcagtcatgtttccagtggtggtcatgtggcccaatgagataaaaggtaaaacttggagacttctgagaaagtgtctcctttctcataaaggtgtgttccatgggaagaggtggtccatttcctttccctcttttcagccatatcctagtaggatgggatgctttaggtgggatcaattagagtgatgtcttgcaagtaaggaagtaaactggctttggaaccactgacctccagccttattgagaggagagctgtctttatgaagacacctttagcaaggatcccattacctacagctaacagcatcttagtcatttttaggaagaatttagttttgtgatttccttatgtgttttatcacagtctgtgtatagatcttttaaaaataattcaacagcttcaaagtgtaagttaagaaaaaaacaaataatcttttgtcatagaattctgaggattttcgtttgtatgtatgagatgaatttgaatttttaaagaatttcttttggaatatggcaatatcttcagcttgcattccacttgccctaggtggtacacttcatcaactttcagaagctgctgattggttttgcttatcttttctttaggagacatatactgcctggactgcctggctgatgtgagctagtttgtctggttgagttggatgtttaaatagaaggcagaacaacaacaggtaagatttttaaaaatatcctttaatttctttgggctctattgacattattacattcattacaaacttctggatgttaagtcctgtgtttaatagccagagaggggaaggtggtgggcagctgggagagtggtgactaacaagatggcaccaccgggttcctgagtttgagggttgggtaaagccagggcaacgactgggatggccaaggagagcaagcagtagaaactcaggtccaaagggcattaggcgtgaaacctaacctgaccaccctatttcatattgcaacttgcccctctacccatgctgtcctctactgcaccccattttcccttacctggtgttcttaaccttttttctttttcctgtggatttcttctgcagtctggtgaagcctgggattgccctctcagaataatgtttttaaatgtattgaataaaaacacataagactacaaaagaagctaattatattgagatacagttactaaatgtgtatttctttattgatacaattttgagaaacagttactaaatgtgtgtttctttattgatacattaaataacaagatttaaccacaggtccaatagctacaaaatagtgatgaatgtaaacaacagttcaagaaatctgcaacaattgtcaatctgatacaaaatgtctgtgatttcaattggtaacaaagttataggtattgctgtggcttctgaggttgttagcctacagtcaggtttgaaggtttaagattaatgaaaataaacgtgccatttttccccctatccaagttcacagatcccctgaattctatccatgaagatgctatgagtctggaactccaggataagaatccctgctcttatcttattctgctatatctgcatagtatttattctcttctaacatcatttattatttacttatttttaaagttcatttttatggtctgattctttctattagaatgtaagtttcacaaagtcattgtctgttttgttcactgatacatttcaagtgtctagaacagtgccttgtacttacttgtggctcaataaatacttgttacatgagtaagtccagaatgcaccagcatctgagtctagacagaggagccaggcccatggtccttctgaatgtggggcaccatgcagctgcacccatcaaactgcccaccagccaattctcttgtactttggagggagccagactgctatgtggaggtggacttggagacactgagttctgcccatggcaccattgggattggatgtgtggaggagaagaggaaaggcttagggctgggaatgaaaaatgcacatggcacatggaatggccgtgccctagggttggcctgccccagactggggccaggtgttagacaacagttaatacaaaatatgtttagacaaatagatcgggcctggactggggagggcctttagtgcccagcagaagtatttacatctatttccaaaagcaatagagaagcactgaatatttttgagcaggagtccaagttggtagaatgaaagaagggctggaaataagggctataagattttgagtktaagtgcccaccttataaatcattagcaaaagcagaatataaccytttctccaattctgtatgggtgacacccaccagtctggtaaatggaggtcgttagtgtgatggggtgtcattctcactttgtttagcacccccactagatatacatattcactttttgccttttttataataatttgagaagttatagaaaatgcttatacatttaatatgtttaatctctctctctctctctctctctctctctttctttctccctttctccacagggtcttgctctgttgcccaggctggagtgcacttgcagtagcataatcacaattcactgcagcctcaacctcccaggctcaatcattcttcctgcctcagcccccaaagtagctgggactacaggcatgcaccaccatggctggctaagttttaaaacttttttgtagagacatggtctctctgtgttgcccaggctggtctaggactcctgggctcaagcaatcctcccacctcagcctcccaaagtgctgagattacaggtgcaaactatctcacccagcctttaatctttttattagtgagatatctgacccaacggctaggatctgatggtctttttagtatggcctcaaatcactgtatcctgtaagcatttttttttttttttgagctggagtctctgttgcccaggctggagtgcaatggcacaatctcagctcactgcaacttctgcctcctggattcaagtgattctcctgcctcagcctcccgagtagctgggatcacaggtgcctgccaccacacccggctaatttttgcatttttactagggatgcggttttgccatgttggccaggctggtcttaaactcctgacctcaagtgatctcccctcctcggcctcccaaagtgctgggattacaggcgtgagccaccgcacccggcctaaacatattttcttctagagtgtttttaggtctgcacacggagtcctaggtcaatgccaacaccaactcacactgagccctaactatggaatcggagcaacatcattatttaggcccatggacaaaataccaaagtaatctgtttctatgttccattatttcctcctctccatacattatacatacaacaatttccctttatcacacgtacctgtgactacgtgggaatcattctatcccaaattgctgcagcacaatctgaggcttactaaatatttgcctcagccataaagctgatagagcattagtttaaaatgcaagtagggaccatgaggatcttttgggtttcatgttgaaacattcaagctgctcttcctactacggctattactactaaatgcattatatgatttttgaaaactagaacaatccaagtctggctaattttttaaaattcccatttctttcactttcccaactgttgtctattcaccctttattctacctttaaagcaagaaaaactgaaataattatttggaaagttttttcacttctgtcaaaacaacaaaacctatatcgtttgagtgattagtcaaggacagttgacaaaaggacagtagtcaaaaagaaaaatggctccctaaactcttagagaaaagaaatcaagcttgcattgtgatcaaactaaatgaatgtacatagtaataagcaaaaattcaaatggcagaccatgtttttcttgcacctatgaattcattctgatggataagatagatggcttaggactccatattacatttgtatgaattaatagatattaggggaatgtgtaataagtgactgcatgattgactgatacaggttttggatttttacttttatttttctgagacagggtctcactgtgtcacccaggctggagtgcagtggtgcaatcttggttcactgcaacctctgcctcccaggcttaagcaatcctgccacctcagcctcctgagtagctgggactacaggcacccaccaccacacccagctaatttttgtatgtttttgtagagatggagtttcaccatgttgtccatgctggtctcgaactcttgagcccaagccatcctcctgccttggcctcccaaagtgctgggattacaggcatgaaccactgtgcctgggcttaggttttggatcttatatctgattatccacaaaaaagaacccagaaacactaatatagtggaagccattgcctcagttaggtaacactagttgtggtgacagataaatgctaacggtagcctaacacaatgaaagtttatttctcgttctgacaacagtcagcataggggtttagtgagtggccttccacatagtaattcagggacttaggcgtcccctacctgtgagtgggagcctcggaggccttcacttccagctggcagatagaaggagagaatggaggatacccccacgggagatttttacgggccaggcctaggtgtggagtgctggttccctttgcactctatgggccacaactcagtgacatggctacctctaaccaaaggcaggctgggaaatgatcacatatgatgcagctactaaaaataatgtctgagttatacccattggccaaggggaagtgtccgtgatatattcgtgagaggattaagtttcagagtatgttgtattgtgtaatatttataaaaagaaatgtgaaaatccctaactatagtgcatgtctttgtataatcctagtgaaaggtgcaggcggctgtataacccaggccccgcacatctattaccacggatttgggtatggaggcagtggcagagacatgaaattattaactttttctttacatatctttggaatgttttgttttttttttttttttcatttcttgcagtgatctcatacttactttggaattaaatttttaggtataattttaaagtatgggtggtagtttttgtgaaatttagaaaaaagaagtgaagaagaatgtgtttgtgcatctccacactgttatatttttttcctgtgggaagatatttttcgaagtggagcagagcttgtgtgtgttccagggtatgctatatcccatagaaagcacacctcaagactgattccatgtttagcaagttatctccacattaaaactttaatttatcagtttcgtgcatatcatatcatgcacataagtgccctgaacctgaatattcctgtcctaaaaggatatacttctcattctaaatcaatatattgatattctgatttgggaaagataaagccagtctggggttttataggaatagatcagctcatcagatcctgataactcttgagtaaactggtaaaatagagttaccaaaaccacaaggctaagacctggactcctggctttacagagattcatccaatatccaccccttccaaggagagccagccagcttcacccatggtcggcttggtggtttgtttactggcctgcattatcacctacctacttgtctttattctctctgcaggtcccagaggtttgtcttttatgtcaaatttttctgtagaacttcacccagcatctagatacagtttattgacaatgaaaacaaaacaaacagacatagaacacagtgatgggaatacaggtggttattcttgagggactgcatgaagcacagttggacaaatagccagtcctctttatctgcagggatgagggcagggacagaaatcagactccctgtctgcttttactcataggagactgagtttgcttttcaytgggtcctagacttccaagtcaaccctactacatccaagtcatcaaaggatgaatgagggaggagagaagggtatactttcatccctgtcctccaaaagagatatcctggaaaatgcacttttaaagtcataastatcatttgaggcccaggtaagagaacatcaataggaaacaaagcaagatggtaaaggaaaagaagagcaataagaatgcttggtgcgaagtagggtcatgtggctgtttgtctgcagcctgcctgattcatggctaactagacaaaatgttcagaccaggtcaccagtttttagatatgtaattgaatggttatctactatgggaatggtataaactaaaaatattataaaacatctctctagaaatcctgtgtcattaatacaatttaaaaagtactaactgggccaggtgcagtgggtcacacctgtaatcccagcactttggggaaggctgtggcgggcagagcacttgaggtcaggagttcaagaccagcctggccaacatagtgaaaccttgtctctactaaaagtacaaaaaaatttagctggacatggtggcgcactcttgtagtcccagctactcaagaggccaagccaggagaatcacttgaagctgggaggtggaggttgcagtgagccaagatccaccactgcactccagcctggatgacagagcgagaatccattaaaaaaaaaaagtatttattgaacacctactctgtgccaaacaccgttttactgagtggcaaacaacagtgaacacctttgtagtgaaaggcaagacagagacccagaaaaaacaaacaagggagtgtagtttgtgatactggggccaaatgaaagactcttgttataaatttgatggacttttaggggatgggaagatcacaatctgctgaaagagtcaaagaaagcttacatgttgagccaggcatttagggatggatttgatttacaaaagcagagaggaaaaggaaacatatttcatatgagattgaatagcataataatgaaaacatttacaaagtgctttacagtttgcagagcattttcgcattcatgattcagagtgaaaataagccaagcttttcagagccaagtgttgagaccaatctgacttagtagaaagtaatcattccttcttacctctctctcctgtcttccctttcctgatcagggttcacggtttcatattgacttcttaatccaaagcccttttataggggatttcttctacaaagaagtggcaaagagaatgagaaggctgcatttcttaaagaaaatgcatcttaatgcttgtatgggtgtgtgtatggtgcacgtgcatgtatatgtgtttgctaacagttggcacaagacactttcttttttttttttggtctgtttatttgagatggagtttcactctgctgcccaggctggagtgcagtggcatgatctcggctcgctgcaacctctgcctcccgggtttaagcaattctcctacctcagctcccaagtagctaggattacaggcatgcaccaccatgctggctaatttttgtattttcagtagagatgaggtttcaccatgttggccaggctggtctcaaactcctgacctcaagcaatccatctaccttggcctcccaaagtgctggtattacaggcatcagccaccacacccagccaacactttctatatgggatgaacaagacattttgtgctttataatcccagtgtagatatcttctggactttgaagaacttcccttttctagccaatcttctgtcttctccctttcttttttttttttattatactttaagttttaaggtacatgtgcacattgtgcaggttagttacatatgtatacatgtgccatgctgatgcactgcacccactaactcgtcatctagcattaggtatgtctcccaatgctatccctcccccctccccccaccccacaacagtccccagagtgtgatattccccttcctgtgtccatgtgatctcattgttcaattcccacctatgagtgagaatatgcggtgtttggttttttgttcttgtgatagtttactgagaatgatgttttccagtttcatccatgtccctacaaaggacatgaactcatcattttttatggctgcatagtattccatggtgtatatgtgccacattttcttaatccagtctatcattgttggacatttgtgttggttccaagtctttgctattgtgaataatgccgcaataaacatacgtgtgcatgtgtctttatagcagcatgatttatagtcctttgggtatatacccagtaatgggatggctgggtcaaatggtatttccagttctagatccctgaggaatcgccacactgacttccacaatggttgaactagtttacagtcccaccaacagtgtaaaagtgttcctatttctccacatcctctccagcacctgttgtttcctgactttttaatgattgccattctaactggtgtgagatggtatctcattgtggttttgatttgcatttctctgatggccagtgatgatgagcattttttcatgtgttttttggctgcataaatgtctccttttgagaagtgtctgttcatgtccttcgcccactttttgatggggttgtttgtttttttcttgtaaatttgtttgagttcattgtagattctggatattagccctttgtcagatgagtaggttgcgaaaattttctcccattttgtaggttgcctgttcactctgatggtagtttcttttgctgtgcagaagctctttagtttaattagatcccatttgtcaattttgtcttttgttgccattgcttttggtgttttagacatgaagtccttgcccatgcctatgtcctgaatggtaatgcctaggttttcttctagggtttttatggttttaggtctaacgtttaagtctttaatccatcttgaattgatttttgtataaggtgtaaggaagggatccagtttcagctttccctttcttaactcaaagtagacctgttcctcctcactgtttcaccaccccgcctccctttcacacctctcctggttctgtccactcctctgcctacgtaaccaggccctactaccacccttctgttttcaggccaagccctacctccttcacaagctcttctccagttacaaatgcaactgattatcatttgcacccctcttcatctctgcagtagttcttaatttcgtggggggcatattatatacccttaagaatgtgatgaatgccttggaccctggacacatatacacaaaaaatatgtgtctaatctcaggggatcatgttcccctgaaaacattgcttttctagatcacatttgtttagaacaaaccatatacttcactgccttaaaatatacttttatatcattttgcctaatatatatcttcataattagactaaccttgaggagaaagctgttgtagaattttttggtatcctcatagaacttggttaaatgtagagcacatagcggtatttaatggaaaaggaatgaataaaccaactagggttcatctatgcaatggcatagcattcagtgataaaaataagctatcaagccacagaaagacatggaggggccttaaatgcatactgcactgtgaaacaagccaatccaaaaaggctgcatactgtgtgattccaactatgatattctggcataggcaagactatggagacatgaagaagacagtggtttcccaggatctgggggagacagaggggatgaacacgtggagcacagatgattttcaggccagtgaaactatcctgtctggtactgcaatggtggatgcatgtcattaaacatttgtcaaaactcataaaatgtacaacacaaagagtgaaccttgatgtaaactatggtcttgagttaatgataacatatcaatattggctcattgattgtcataaatgtaccacattaatgtaagatgttaatgatagaggaaactggaaggagggccaggtttatatggaaatgctgttttctgctcatttttctaaaaatgtaaaacagctcttaaaaaataaagtctattaatctaaaaaaagaagagaagtttccgattttggctgcagcctctaatgaccattgggataaagaagaggcaatgccttaatacaatgcatgtattttaactttttgaaaattgtatccgtcattgttaagctcagttaaacttgcgcttgacatgtcgacacaatgtccatttttaaatgaactaacagaattggtaagatatgctctcatgatagagactcagccaattctaatgtcaatgaaaggctccacatttaatgtacacgtttcaacatgaagaaaatccattaaaatataattagcgagttttacacataaatagaaagaaggcctacctagaccttgctgccatttaaaagagttctttcttctttgtctgtttttgtatttttcacagaagctttgaggaagagccataactacctggagcagaatgattatttggagccacagaaaatcattttagggagcagtgggtccaggttcagtgttgtgtgttcaactcggaaagaacacagttgggtggctgaccgggttacttctcccctgtggctctgcttgcattggtcattgaggtcaggcaggggtttggccacagtgttagccattggccctgcattgatcctcacatagtaacatcttgtttggttattaaagtgactgaattgttggaatgaagcattgcaaagtcttgttattccatccatcttcacaaagactataaactaacttcaccatgtagtgactcagctggttggctagaaagtaccttgtaagatggcctattctgccaacatttcctatcccaaacaaatctcccaactctcaccaactctttacattcctgtgtagtctttagggtgaggggctgggagtgggatggaggaaaaggtagacgaatgaagtaaagggtcagtgcacaggcagtaagtactgctgaccactgtaatgtccactcacagctgagatacagtgttcaaacttccctcaaaaaagccacactgccctcagagtgactccttggaccccagccatggatctggccacagcattcatttgattccatgcattacctccttgaataattataaaaattatgttttccaaatagaacaaagagatgcttcctgaaattcttctccttggaacactcatgatatgcattcaaagtgcttagcctgggggtcgccattgtgtacacacaataaatcttagtgtatcaagaattcaggcagtcatgaagctcaaatgacaagaatttttatttttattttttttaacagacagaagtcagggagggcagtcattgcttagacaatgagattcaagcaagtgctgttctaaatctctgagctctgtaggggagaagatggatgaagcaggcagcttgaagagggagacacgccagccagaaggaaaagaaagaagccggtgaagcaggaagagaagaaaacacgaaagggtaggaagatgagaaatggatgccaaggagagggagaaagagattgtcagcaagggaggcgaaccgaggagaaaacagggagattcccgcatgggtggagccaagtttccactgtgctgtgagcagaggaagccaggtgtattgttcctgaaactacgttattaactgcctaacatatggctcacaaggtacacgtggaagcgagagcaggaaacaaaatgcaagtcagctgggctaacgctgaaaaatagtgatctgtgtcagttttgagaagtgtgagaatagaaaccttctatgcaggagatcagcatctttgtctgtttcctacaccgaggctcaaagagaacatttgctcccaaaccatggtagttctgtttcagataaagttgtctcataccaaccataattcatgttcctgatcgtgaccctgaagcacaagaacccaaggaagcttcggaattttcaaagaaaaatgaattacgtagagtggtgtgaccagcaaatgcagtttgaattttaagtgtgtattctaattttttagaagattctgattccgtgtgtgaaagattgaattaccctccattttctaggatgtggcccatttgccagccagtctggacctcagatcttagttctggttctgtaacttcagttgcctgccagacatttccatctgggagccctgtcctcactctgaaacattctcagaaccagcctccttctccacctgccgtcagacattagcaccattcctctcccattgtcacctttgattgtctcttctttacttccatacactgcttttttttttttttttttccgacagtctcactctgccacccagagtatagtggtgcaatccctggtcactgcagcttccacttcctgggctcaagcagtcctctcaccttagcctcccgagaagctgacaccacaggtgcacgccatcaagcccagctaattttttttttttttgagacagtctcactttgttgcccaggctggagtgtartggcacaatctcggctcactgcaaactctgcttcccgggttcaagcaattctcctgcctcagcctcccccaagtagctgggactataggcgcacgctgccatgctggctaattttttgtattctagtagagatggggtttcagcgtgttgcccaggttggtcttgaacttctgagctcaggcaatctgcctgcctcggcctcccaagtgctaggactacaccatgcctggcctaatttttaaatttttttgtagagatgggtttttgtcatgttgctcaggctagtcttgaacttctgagctcaaaagatacacccccctttggcttcccaaagtgctggaattacaggcatgagccaccacgcccagcccaatatgctgccaaatttttcttcaaatgatttcctagttccttccttgccattcttgctgccctgaattaagcccaggtcctcatttattggcttcccacttgactccttctattttagccagcacacatgttgtagaacaacttccttaatgtggctttcacttggcttctgactcagagtgtatgaggtctcctaatttcctagggcagtaggcctggccctaccccacaagcctcattaccgttttatctgcccatatcccatcaccctctatccacatcttgttatccagtggagagtttccacttctaggttccaagccagaaatgtgtggatcattctgtcttccctcacttccttaaacaacccgtcggcaagtcccacagactggatctccagagtttccctgtagctcttttctccatgctcaccaccctagtttagggcaatgccaccctttattgagactctggaagaacctcctgacagttcctgctcccctctggccccgtcaatccattttctacacagtggcccagaatgtttaaaaatgcaaatcaggttgtatcatgcctccagtggcttctcattgcacctagggtaaaatccaagatccttatagtagcttccaaggtcctgcatggcttatcctctccctccctcctcgaagacctcaatgcacctgactgaactgatctcagcacgtttccacctctggccaggctctctacctaatgaccctcctccctgctttttgatccattccacctctcatctcctaggtcttggcttaaatatcttcagagaagcccttctggacttccttcagtagtgtcattcccacttcccgccactattcttattacctgtttatttccttcatacctttttatcatttgcaatgattgtgtttgtttcctcatcttttttctgcctcccccagacctgaagctccgaaagaccccggagtgtttgtcttgttaaccatcgtttctccagctgtccacgcaatggtcaatatgttagctattataattactattttaatattactgtttcttgatgatttcagactctttggatagaatattctcccttctatctgagagtgtttgtgaccttctcatatttcctcatgtcctctggaatcctgacctaaatttttagtcttttcctatcagttatcaattgcttacttgttgttttcatgtttaaaaactcattcaactccatccaaactttcttcttcttcttacaaaatagtttatagctaactatatttccttactctcatttgttccttccctgtattcagtgtctccccatcaatatcttttattactccagaataatttcagaaacagtttgagacagttttaaaaataatgccgctggcattttactagggatgacattaaccttatcagttagtttgagggaaatcagtatctttgcaatatcaaaactcttcctaatcaaggacagaccacatttttccatttatgtgtttttaaataaaataatgttttctttgtattggctttttaacattattgttaaattccccttcaacatttaactgtttcactacaatatgtctaaatctaggtctgttttttattaatttgggctaacatatgatgagctttgatctacaaatgcaggtcttgcttcaacttaaaaatattttcttttctaatatctttaaatagctcttctgttctttttttctctctccttyaaaactagatttctatcacctgtctttctatgtctagaccttgtttctgatagttttgatctctttgtcctttttttttcttttttgtgaggcaggttcttgctctgtcacccaggctggtgtgcagtggcacaactcagctcactgcaacctctgcctcccaggctcaaacaatccttctacctcagcctcccaagtagctgggaccacaggcacttgctaccatgcccagctaatctttgtccttttcttttgcattacagaatacagtcctatgcttagctttcttttcactgattgaattatcttccattgccagttgtaaccactgtggttgctaagtttatttacaattcttccatgtcattattattattatttgatacagagtctccttttgtcacccaggctagagtgcagtggcctgatatctgctctctgcaacctctgcctcccaggttcaagcgattcttctgcctcagcctcccaagtaggtgggactacagatgcacgccactgtgtctggctaatttttgtatttttagtagaratggggttttaccacattggccaggttggtctcaaactcctgacctcagatgatccacccaccttggcctcccaaagtgctgggattacaggtgtgagccaccaygtccagtcacattattttcttaactgtgtcaactctctcatatcactttgttggcttatctcattcttaccttttatttcatggagtctgagatttttatctgtccctccatcaaatgtagtttaaatattgttttaagtgttgttcaaatgtatttccattttctacagtaacattttttctttaaaatattcaattttaacacttcttgagtgctaygtgtatccattttctcgttacagaatagttgcataggttacacgtgatatagtttggctgcatccctaaccaaatctcatcttgaactgtagctcccataatccctacatgttgttggagggacccagtgggaggtcattgaatcatgggggtgtgttttttccattctgttctcgtgatagtgaataagtctctagagatctgatggttttataaaggccagttcccggctgttcgcagtggctcatgcctgtaattccagcactttgggaggctgaagtgggtagattacctgaggttaggagttcaagaccaacctggccaacatggtgaagccccatgtctgctgaaaatacaaaaattagctgggtgtggtggcgtgtgcctgtaatcacagctactccagaggctgaggcaggagaatcacttgaacctaggaggtggagttgcagtgagctgagatcactccactgcactccagtctgggtgacagagtgagacttggtctcaaaagaaaagaagaagaagaagaggaagaggaagaagaaagaagaaagaagaaggtggtggcagttcccctgcacatgctctcttgcctgctgccatgtaagatgtgctcctcctttgccctctgccatgattgtgatgcctccccagccatgtggaactgtgagtccaataaacctctttttctttacaaattacccagtctctggtatttcttcatagcagtatgaaaatgaactaaacagtaaattggtactggtaaagtggggtactgctgtaaatatacctgaaaatgtggaagtgactttggaactgggtaacagacagaggttggaacagtttggaaggctcagacgaagacaggaaaatatgagaaagtttggaacttcctagagacttgttgaatggctttgactaaaatgctgatagtgatatggacaataaagtacaggctgaggtggtctcagacggagatgaggaacttgttgggaactggagcaaaggtgactcttgttatgctttggcaaatagactggcagcattttgcccctgccctagagatctgtggaactttgaacttgagagagacgatttagggtatgtggtggaagaaatttctaagcagaaaagtattcaagaggaagcagagcatgaaagtttggaaaattttcagcctgatgatgcaatagaaaagaaaaacccattttctggagagaaattcaagcctgctgcagaaatttgcataagtaaggagcccaaygttagtcaccaagacaatggggaaaatgtctccagggtatgtcagagacctttgcagcagcccctcccctcacaggcccagaggtctagggggaaaaaatggtttcctgggccaggcccaggcccccactgtgtgcagcctaggaacttggtgctgtgagtcccagccactccagctgtggctaaaaggggccaaggtaccactwggacttgtggcttcagagggtgcaagtcccaaatcttagcagcttttacatggtttgagcctgcaggtgcaaaaaagtcaagaattgaggttggggaacctccacttagatttcagaggatgaatggaaatgtctggatgtccaggtggaagtttgctgcaggagcagagctctcatggagaacctctgctagggcagtgcagaaaagaaatgtgggtttggaacccccacatggagtcccctctagggcactgcctagtggagctgtgagaagaaggccaccatcctccagaccccagaatggtagatccactgacagcctgcaccatacaccaggaaaagctgcagacactcaactgggaaagcagccagaaggggggctatacccagcaaagccacagaggcagagctgcccagggctgtgggagcccaagcttgtgtcagcatgccctggatgtgagacatggagtaaaaggagatcattttgtaactttaaggtttaatgattgccctattggatttcagacttggatggggcctgtagctcctttgttttatggccaatttctcccatttgaaatggatgtatttacccaatgcctgtatccccattgtatctaggaaataactaacttgcctttgattttacaggctcataggcagaagagatttgccttgtctcagatgaaacttaggacttggacttttgggttaatgctggaataagttaagactttgtgggactgttgggaaggcatgattgtgttttaaaatgtgaggaaatgagatgtgggaggggccaggggcagaattatatggtttggctgtgtccccacccaaatctcatcttgaattgtagctcctgtgtgtcatgggagggacacagtgggaggtaattgaaacatgggggtgggtttttcctgtgctattttcatgatagtaagtctcatgagatatgatggttctataaacggcagttcccctacatatactcacttgcctgccaccatgtaagacatgcctttgctcctcctttgctttccaccataattgtgaggcctcccasccatgtgaaactgtgagtccattaaacctctttttctttataagttactcagtcttggtatttcttcatagcagtatgaaaatggactaatacaacatgtttgtttttccctcttaatatattttggaatgaggaaagatctctcttgactatgcattcccccaaaagtaatgtgaatggatttcacagcttacctgaagtcaattagaataatccttttccatcttgaattggaggatggaatgagataagttcagtgatccatcaggcagatgggtgtagcagggatcctggtggtgctgggggtgtcctaacagcaatcctgatcacagccatcagtggcgctagccaggtgccaggcctgatttggaacattgcatgtgtgtttccttgtttaatcctcacaatcactctatgaggtatatatattatcatcattcccactacatagatgaggaaactgagggctcagttaagaaagttatccaagctaataattagcagaataagcattcaaacccagactatctgactccagaattcatggtcttaacttttatgttatattgcctcacttgctcctgggcctggggctccagtgccacagcccccaaggtaggagtgcttcctgttcctcagtgggctcaacctgagggttcagtgggatggaccttccactttcatcccatgacacacaactctttgaagtgagttgaattgtgagtcttccttctagttcctccttgtcttaatatctagaatgaaagtctagaacacatccctagattttctttctctctctttccttccttctttccttccctccctccctccctcccttctttttctctttctttctttctttctttctttctttctttctttctttctttctttcttctctctctctctctctctttctttctttctttctttctttcttgtctttctttctttcttcttttttttttttgaaacagcctgctgcccaggctggagtgcagtggctcgatctcagctcactgcaacctctgcctctgggttcaagcaattctcctgcttcagcctcccgagtagctgggactacaggtgtgcrccaccatgcttagcaaatttttgctttttttttttttttttttgagatggagtctcgctctttcacccaggccagactgcagtggcgctctcttggctcactgcaagctccgcctcctgggttcacaccattctcctgcctcagcctcccaagtagctgggactacaggcgcccgccaccacgcctggctaatttttttttgtatttttagtagagacggggtttcaccatgttgaccagactggtcttgaactcctgacctcaagtgatccacctgcctcagcctcccaaaatgctgggattacaggcatgagccactgtgcctggcctatgttattttattttattttattttattttattttattttagagacagggtctcactctgtcactcagtctggagtgcagtggcacaatcttggctcactgcaatctccacttcctggattcaagtgattctcatgcctcagcctctcgagtaactgggattacaggcgcgctctaccatacccagctaatttttgtatttttagtagagacagggttttgccatgttgcccaggctggtcttgaactcctgacctcaagtgacccagccgtcttggcctcccaaagtgctgggattgcaggcatgagccaccgtgcctggcctgtttttattttggtatttttaggagtttctaggagctggggattgaacacctatgctctgttcccctttttccaggtctctccctctgccctgtctccctctctgtctcctgcttcctgaaacactcttctgccttgcctgccattctgcttcattatctccagggtctctggctgtgccctccccatcctccctctcatctgtctgcaccttgattcccccttggctccattctcagttgttcttttctgtctccgccctccttggtgacctcacacactctaaagctttcaccgccatccacactggtgtgtggtccctggcctcagcccagatgtctcccaaacttcctttgaacagtgattrtctgccgaatgcttctacctagggggttcacaaactggacagcacacactcccatatggaacactgcactggtcaccttttctcattgaatgtgccttccacttgctggggagtcatcctggattcctgcctctggtctggccactctgcagtccaactgccctccctgctgtgggcagatgatctctcccttcctcgagtcctccaaagcctccagcgccagctcttccatgtggtctcagaggtcatcagggatttgatcacttttcacctcattgaactttgctctttgctggattctgtttcctgctctgccacccaggctggagtgcagtggcacgatcatagctcactgtatccttgaattcctgggctcaagtgatcctccagcctcagcctcctccagcctcagcctcctgagcagctgtgattacagaggtgtcccaccacacctagttaattttttttttttttagatggagtctcgctctgtcaccaggctggagtgtagtggcgcaatctcggctcactgcaacctccgcctcccgggttcaagtgattctcctgcctcagcctcccaagtagctgggactacaggtgcccaccatcatgccckgctaattttttgtatttttagtagagacagggtttcaccatgttggccaggatggtctcgatctcttgacttcgtgatccacccacctcagcctcccaaagtgctgggattacaggcgtgagccaccgcgctcagccaatttttttcttttttttaaagacagggtcttgttgtgttgcccaggctggtctcaaactcttggcctcaagcgatcctcgtgcctaaacctcccatgtattttcccagctttctgcacagcttggagttccctgtgtttattttccatggccttgcccctgtctgctggtaaatggccttctggggaggggaataatctctgctctttagcatttgctgacatctgtggtgtaaatattcccatcaccgccaatctcaaactactaacatgacttcattgaatgtggagttgggtagagatgttcaatagccaccattagacagtatttccaccttacagatacaatagacctaaaacaaaccctcagccaggtgtggtagcttatacctgtaatcccagtattttgggaggctgaggcaggtggattgcttgagcccaggagattgagaccagcctaggcaacatggcaaaatcccatctctacaaaaaaaaaaaatgcaaaaattagccagatgtggtggtgcatgcctgtagtcccagatacttgggaggctgaggtaggagaatcacttgagcctgggaggcagagattgtggtgagctgagatcacaccactgccctccagcttgggtgacagagtgagaccctgtctcaaaaaaacaaaaacaaaaccctcaagggcatagataatagtaaatagtagtaaaataattagggagtgatatatttttagcatttattatctttagtattttgtattttagtatttataacctttatttttaatataatttatttaattgtaaacttacataatttaattattaataatgaccacatgtaacagcttgctggcaaaattcctgaacacttagcgagcagccctcctgagctggtttgagctagctccagcgtgctcctggctccccttcctagagatccctcatctccaccgacatctggtcaatacttatccttcccttaagtcagctctgctcacagtgggagtgtgtccctctgccactccatcactgctctccccacattgcaatgatctatttacacacctgtctcacctcctattccatgaacttcttgagggcagaggctgtgtctcatttatctttgtaatcccagtatagtgcctggaacatagtacacatttggtgaattatgatttaaagaattgatggtgccttttctgttagcactattcttttctcatctatctctatttctaatcactttgggaaatgctcttggctgcatgatgaaacagagtgccaggtcttcataaaaaaaaaaaaaaaaaagcttgttgattgggtaaactcaccaagctgactagagcagttttaagtataaattgtttactcatatactgcctgtggctatagaatgcaaattaatcactttggcaaagtgttgtattagagttctccagagagacaggaccaataggagataggtagatagatagatagatagatagatagaaccaataggagatagatgatagatagatagatagatagatagatagatdatagatagatagatagatagatagatagatagatagaaccaataggaaatagataggtagatagatagacacaaccaataggagattagatagatagatagatagatagatagatagatagatagatagacagacagaaccaacaggagatagatacataggtaaatagatgataggtagatagagatagagagttatagatatatgagaagggatttatttggggaattggctcacaaactatggaggctgagaagtcccatgataggttatctacaagctggagactcagtgatgctgacagcatggctcagtccccgtctaaaggcctcggaacctcagaaccaggggagctcatgctgtaactctcagtccgaggctgaaggcttgagaacttgagggggtctgctggtacaagttccagagtccaaaggccagagatcttggaattctgatgtccaagagcaggagaaaaagggtgtcccagctccgagagtgagtgtggattcacctgcctttttgttctatccaggtccaaagctgaatgggtggtgcccgtccatgttgagggtgaatcttctccactcagtccaccaactcacatgccagtctcttctgaaaacaccctcacagacacacccagaaagaatgcttcaccagctatctaggcatccsttgagccaatcaaggtgacacctaaaattaaccatcatagtgataatttaaggcattaaggacatcatttcatgtcctgcagctctttaagcccaggcttggtcattttcaataagtggaaattaacttttttttttttttgagacagggtctcgctctgtcacccaggctggagtacagtggtgtgatctcggctcactgcaacctctgtttcacgggctcaatcaattctccaacctcagcctcccaaatagctaggattacaggcatgagccaccaatgcctgactttttttttctttttggtagagatggggttttgccatgttgcccaggctggtctcaaacttgtgagctcaaaacaatcctcccactttggccttccaaaagggattacagaggtgagccactgtgcccggcctggaaattaccattctaagtcatctttgtgactgctgtgactgccaggaaatcagagtagtccaccaggaagagttatctcttgggctgaacagaacagtggttgagtgtctctggtgtgacaggtgctatattcgccatggggatagatgaatggaaaggaatttgtaaaggtattgacaatgttttttgagtttttaaacaggatgcttgtcattttaatgacacagactctaatttctaagcatttttagagggatgcatatttttgtatactattaactgcatagtcttctttcttagaatgcctaatttaccagacattgacagaactttagctcaagcctcactaagaagacgtagcagtgcacgctctgggattattttatacttcactaggatgacttatttatagaacagaatctttttgctttcctacaagattcaacagttctattaagcaacagcaaaagaaacagctacttctccagagcagacttcaatcttaagcaagatttatatttcaaaaataaatatttaaaagcaaatcataacagagctaaaaccaacaataccacatatacccaaactatgccagtgagtctgggtccatatcttgtaggaattatatgtttctgaaaacctagagagattttattctctccctaaagaaaagtttaaggtcttattctatccatacacacacacatcagactgaaaagcaaaatcagaagactgagttcacctgaatttaattcaaattcgaggaagtagcatttgaaatagcttattttttgactggattcaacctgaagtatattgtgatttctcaatatctccttccacagggaaacattatttcttgcctatgatgggtacaaatctatatatactctgcacatacagtcactctttgtcacacttgataatgggtcacatttgtggtgaacagatgtttcctgagagtctgagactcatgagcaaagccgtggtgtgggtaagagggatgagctgttctcactggatgcttcaaaaggggctgtgcttacaattagtctgaaagccaaattatccttattgaagaaggacaaaatggcatgggcaagctcttatctcctgtcttaggacagatgctgcttatgaaaattgtctgtacctgtctttgatgattctggactagaaatggttccctggcatgactgggtgtcttagaaaggacactgtggagttaacttctggaaggaaagtctaacatgatctgcaggctcaataacagataaagggaaaaaagaagggaaagaagacaaaaggaaaggagtttttcactctgacaagaaccacatgagtgactaaccctaaagatggaaatagaaaatgacctttggtgagggatattttctgaacattcaaagctggatttgactgctttataacatttcaaatggcatggaatgtactctgttgtgaatgagaaatgccccctttaaaatgagcaaagccttaagttagtctacatgacagtgactctggccaggtagaatatttcaaccctgcacttcctggcctgtaccctttcgagcaattgcatttcataaatttcaggagcatgcctgaagcagatggttgagacatgggaaggatcataaatccgggcctcaatgtcttccagctcccaaattcaaggctctgaaatgctggccttggcacaacttggcatccatgccatggaacagtcttccacaggtggtagttcagtatcttatgtttagttcttattgccgtccttgaaaagcagcagtatataggaatggtaaaagacctctctttttcttgtgtgccataaaaatagctagatagaaactctttccagagcaaagaaaagtaggttgaaatgttctacactttgtggttgaggctgaattccgactgagcaaatacacacaaatgaggggagacaatatcaaccccacaatgttggggtgaactcctcggtgacagatgaagaaacaaacactctcagtgcagttatcctcatatcagatgctttaccctgaaccaaacgtttttccagaaatttttttctctgttaccaaagtaatacacattcattctagatttttggaagttcagacaaacataaggaagaaaatctcctttgcttttcctgtacatgtacacgtggaaaaacgtcctttgccttgggtcgtgttttgtggattatgcctaattaaagacagtactcttcttagagaccagtatcaaaatgagttgaggggacttgcaagaaggaatgaatggaatgtattcatttctccacattcctatccccagtttttggggaaaggtggtgagcccctgtgtcttgcattgataacacgagaagtacctgagagtttcctgcgagaaatgagcagtcactgtacctcatctaaagtgctttgaagccaagcacggtgactcacgcctgtaatcccagcactttgggaggctgaggcaggtgtatcacttgaggtcaggagttcaaggccagcctggccatcatggcaaaacccggtctctactaaaaatacaaaaattagccaggtgtggtggtgggtgcctgtaatcccagctactcaggagactgaggcaggagaatcgcttgaaccggggtggcggaggttgcagtgagccaagaccatgccactgcactccagcctggacaacagagcaaaactcggtctcaaataaataaaataaaataaataaaataaaataaaataaaataaaataaaataaaatagtgctttgaatgcttgagaagaacctggtgggtcactcagttcatcctctgaggaggcgctcattcctgtttgaggataagagtggagaagaacattttggggaagccctggacctttcgtattcggcctttcagagaccttccagtactgggtcactgatgtcccttcaggatgtgagtaacctccactgactactgcagacctctgatcacttcctttagtgtaactcgctctgcacagccacaaaagatgggctgctgcctggctgaggaaacacccttctggtcaaggggctgaagaaaatctgttgtccgcttgactgaggacgacttcctgacaaatgtttcacatggaagaataggtccaggtttccataggtttgtccaaaggtttggttatgttatatcctgcttcttttgaatgataacatccatcatagagttataggctgtggtcacctgttctcggacctttggttgggtccctgaatcacatgtaactgtttttctgtaatcatcatcaaatccaccttacctgtggctctagaactcagcaactctagaacacagggctgttagttttccagatcttctttgtaactatgttaagcattaagaaatactaggttcagggatgacaggcatacaatgtgtatgtatctttttctgccaaaatgaggtgtgaatcagttagcacatttgagacctggtacccaaaacagccaggatgaatgaggtgaagaaggcacagtgggagccctcaggtgccacttcctctccactctacaaaatcagaagtctctgttgcttgcatgttatgtggatgtggttttcatttttctggcccttttggattggctttcttttggaccgtttgtgtggcattgatgctgccttcccccagcacggcctttgcttctgcctctcctaaatgaagcaccccactgtccagatggtaccatctcttcattacagaaaaatcatctaagtagaaagaagtagcgtttgagccacattgctatgtagtgttgggaggaacagtctctatcgaccctcagctcacttcctgatcaactcagcctatggctcagacaattggtttgttttccacgaaggtttaaagtgtggagtacatggttccaaccctcaccctctcactcagtttttctgggaaaattagctggcatgatacatttcagattcaaaaagctggactctgggatgccctccccaagatggcagagctttgggatgaaaacagtgtcaggtaaggagttaagtagccttatcttggcctaagttcactgaactgaccaagcttgattgtatccagttggtcaagtggacactcaacatgactttgctggaatcacaaggtggttgttgccattggaggaaagaacagatgtggaaggcctcatacaaggtgggaaaatatagttctctggagttccaatgagagagttccaaggcctcactgaattagggccttggggaaatatgacacagattctagagctgagcaacaagasaaagcatgtctaatgagaaagtgagctccccagaattggaggatttcaagcagagaccaggtacctaggtgccaggggtgctatgaaggtagaagactggactaggtgcccagagtctctgtgtggtgatcaaacttttccaaagattgtagttcttggcactgacctggagtcctcaacagcttctgcatccttggtctcaacttgggtctggtgtcctggtccctaggtggtgagctccctgagcacagggcactggtcttgtccatcatcctcccctagcacctgtctctgtgcctttcaccttaagggtgttctacaagtgtttcctaaaggggtggtggcatgctggctcctccaaccccagctgtgagctgaaatactgtctcaaatccaaactgtctacatgatactgataagaaacaggattckaatctcaattttgctacccaaggattttgatgtaagagaatgtaaatttaaaaccaacattaggactgtgagtttgagactaaaactctggccttgctgttccatggccttaggagaagcacaggcatcaggacagatggaaagagagagagcgagacagacagacagacaaacagggtgctctgcaaagcagccagtgggcagaggagcctccatggagctcctagaacttatcttagcaattttccaagtttctaggcagcctgaccaagtaggaagaataatttggtcaattccatgaagaggttccctcttttgaaatgyatgattctaatccgcagctctttcatcaaagcaaaggcagtgaataacacagcccaaactgattttgttggtaaacaccacccaactgttttcttattagtttaccttggcaatacctctctatgatgtaattatgtgaggtttcagagccatatttacttccatcccacacacaccttatgttacctcatcttccactgccatattgagagaaaggaacacttctcagttcctgcagaaacttgaagaatcctattgggagataaggcagacattgactccaaatagttgggtggtggtgaagtgcaagtatgagaccagggcttccgtaggaggaggtcacttcagaggaggaggagaggggaagaggaaacccccaggcagccagtgaccaggaaagcagtaaagtgatggctaattattgtgaaagaaccaagttggaaacagttcacatcaatcctcagagagggttggacaattctggccaatttggtacacctgtcaaggaaagatggtgatatggtttggctctgtgtccccacccaaatctcatctcgaattgtaatccccacttgtcaagggagggatctggtgggaggtgattgcatcgtgggagcagtttctcccatgttgctgtcatgatagtgagtgagttctcatgagatctgatggttttataaggggctcttcccactttacatgctctttttctctctcctgccgccttgtgaagaaggcgcctgttttcccttctgccatgattgtaagtttcctgaggctaccccagccatgcagaactgtgaattaattgaattgcctttgtttataaattacccagtctcaagtagtatctctagagccgtgtgaaaatcggctaatacagatgggaagtcagggtctctcctgggggacagaggagcgtgcttgagacagaataggaagaaattcatacagaatcgaaagagttgctgacatgctgctgcccaaatacagcagcttcttcagacctcaggtgtcccccagaggtgccatctttgaatctaatgtgtagattcttattcagttggtctgggtagggtgtgggctttagaattttaaargatctccctggtgcttctaatgcacaggtagggttgagaagcacactgttctcaaagagtggtcccagaccagcagcatcagcatcacctgggaaattggaagaaatgcaaattctagggccccaacccagaattactgaatcagaaactctggcaatggtgcccatcaaactgtgttgtatttaacgagttctgcaggtgattccgatatttgctgaagttgaactactgcaatagagatgtttgaatctcaggatgctcccatccctgcccctgctccctgccttccttagttctccaagaaatcctgtctctgactcccccatccaggcttggaaccctggaggcttcctcgtagggctgcgtagagcaggtggggagggcaactccasagccctagtcacctgtgagctgcgtagacaagagaattttccagcaagtagaagtcaagtgtcctggggaaggtctgatttgcagagtcagggtttagttcaatgattgggcttcctggactccctcctctccttgtccttcccaatcagttgccaagcccccagctgtttcattaagaaatatctgaatcctcctccaccgatcactgtccattttctcactagtctcatgcttcagccctacttcctagattctggtagggatctcccagtgggtctcccttgctgctgtctccccccgtcccagccccccatcagctgtctttctcgacagcacttggcgcccatcccttcctcttccaccctgcttcccatgtgagcttgacacatgcacgctgcccacctgtacatgcatgcacacgtgcctgctccacaagacgccgccagcaagtcctgtggcctgtcctgtgggcaaagtccatgatcctcagcctggtatccagagacccccctgccggcccctccctaccacttcaaccttatctctcaccatcctgcttcatgaatcttgtgctccagccaaactggtatactggtaaaaccccgataagataagcaagtaaaattagagcccataaacccggaacaggtacaggcagccacggggtgtccagaggacgcagctttagtaacttcaagtgctcaggggtgggaatgggtacactccagtctttgagttaaatagcatgaaagtgagatgatgtggagaactgaactaattactcaaggactcaagaactcactgctctctctgcacctcttcttttctttatggtatttcactcattatatccttcttagaaaatctaggttgagaaatgattttatggttatttcaataaactgatatattttatagaaaatgagccaggttcttggattatggaaacaaaccttaatttatgtcaagtgttcttgcagaaagagtggtgccacctaccttcataacctgaagagcaccattgttacctgatggcagctacctaaaacacaggcagtagtacattcattcatttcagaaacatttcgtgatcacctactgagtgacaagcaggcattctcccagtcactggggatacattgttgaaccagatataactcttcttctcaaaaagcttacatctagagtgttggtagaggcaagctcactgagtaggattggggtgctgtggcaggacacggatcgacaatggatcatctctgggaggccctggagggttccttgaggaggtggtggctactctaagtcctgaaaatgcacagaaaggagcctgccttgttaggagagggtgaaggtataggatggcacagggcctgttgtaactcaggtgggtgcaggtacaagtcagactggggttcagtacagagaccaccagtacagacagggatggaactaggatcagtaaagacagggacttggctaaatgttcaaggtaygaaggtgttggccaggctgttctctaactcctgacctcaagtgatccacctgctttggcctcccaaagtgctaggattataggtatgagccaccacgcccagcctccctcactcagttcttatttctatactgccattctaggtggagactggtaccataccacctgctgacatattcccttggaggcagctgctgccaaaacttaggattatcttctacttgagggtttaccattattgggcctgtgcctgggtcgcagtgccccctttgcagacagagtgaatatttctgatttacattgttcattggagtgtggagaattgagccttgattcaagtagaaaccacgttctcagagggtccagctgggctggtgagatgaataccacacatagacggctccaatggcttcatggagctgggggaaggctcctggtggcacatgtagagcagacccctggtagcaactcagcctcctggagagagagttgggaatactgggtcagatgccatcataccagcatctcagaggctagtccctctccatccctgatccctgaactagctactgggccttggctttttagcagagggctgcaattgccaccctccagcctgttctagtggcttgtttcctatacaggaattggtgaattgaggacatacccagaatgggaccccacctgtggcaggaatgctatatgctttccaaacctctttccttttcctcctgggctggctccatttctcagcctcctttgcaattaggggtggtcatgtttccaaagagtgtgtacaccacctccaggcctggcctgtaaaattcttcctcatatcatcttctctgttttccacttgycagctggttgtggatgatccagcagaggcatctgaggttccagtggacgacagggttacaagatggaaaaagcctgaattcctgagtcactgcatggaaggctgcctactgaacacacacatttgggctgttacatgagtgacagacacacttctgtagtgtgaagctcttgagatttgggggcccctcattacaacacttatgctattcattctttcccccaactctsttcttttgtttgtttgttttttgtttgagatgcagtctcactctgtcgcccaggctggagtgcagtggcactaycttggctcactgcaacctccgcctcccaggttcaagcgattctcctgcctcagcctccctagtaactgggattacaggtgcacgccaccatgcccggctaatttttgtatttttagtagagatgggttttcaccatgttggccaggctggtctgaaactcctgacctcaagtgatccacctgccttggcctcctaaagtgctggaattgcaggtatgagccaccactctcagcctccccaactcagctcttatttctatattgccatactaggtggagattggggccctaccacctgctgacatatttccttggaggcatctgctgccagaacttcgaattatcttctgcttgagagtttctattattgggcctgtgcctgggtcacagtgccccctttgctctgtagtgggacttcctggtcctgacaacttgcctgaaatgccatttgtgatcttgctgtcaaactctggattctaacttttgctttctgagcatgctgtctgtctccttatgcctgctcccactctcactcccagtgactaggaggtgaaaaatgactgttccaggcaccaacttgcctgaaagctctaagacttgccttaaggcagtcaagccgtctgctgactctccacttttgcaaggagaactacgtctagtcatcaacatgtagccgcatccagccatgaggaggggcgggagagatttgacaacatctcaggaagtgctaacatctgacaagctgagatcatgggtgtcataaattgatagagaggctgaaatgagaaggagataggatgggccatgtgtggttagcaacatcaagagcaacttgtagttgacaacctcattgctcatcttctgctgacacatacagccaaagtctgaatggtggcattgcttcaactcccctgctgtgtgatgggggcacctgattgatgttgacacgccaatgttgggctatcatcggaggaggtctgtattaattttaacaatgaaaatagacgggttacagttaccytaaatagcatcaagtcaccccacttcataaagcccttcaatggctttcctttccttttggaaggaagtagtgcatttttcacatggtccactgggtcttagatgtcctgaccctaccttatctctcctgtgtaggccagtcctaccctttcttctgcttaatgcctcccagccatgctggtgttttctacattcttcatgcgcacccagcacagtgccaggcaccctgtacaaattcaataaataattcttggattaatgaataagaggtcaatcaggagatggctgcaatctaatgagaaaccatggagctgatatttgggtgggtgtctctaaatctaagccctaagaaaccttgctcgttcactgttctagtgtcttcccattgcctagaacagtctcccatgcccagtagatgccaaggcatttgttgaatcaacgaaatgaagtagaatgaatggataaaaggagtagtgaccagaatgagggagacttcataggcaggaccagcagggcttgctgactaactggattttgagatgagggggctgagagaagtcaaggatgatcccaagtttctggcttggggctgaagggaggaaggtacaatttactgagacgggggagatgggatgaggttaatggagaaaggaggctgcggcaatgagtctagctttagatttttcgagtctgtagcatctgtaggctggttgtcagaggatgtccagtgggcagctggatatattggtctgaaactcaggaatgacaattgggctggagagaatagatttgggagtgaacagcctgtgatgttaacaaaagccaagtgagtggatgagattgcaatgtgataggtggtgtggttgtacaatgatgtataaaatatggtccctgccctcaagactaatacaaaatcaagatatgacatagaccttaaaactgtttatgagcccatccatatctccatagcaaccttgaagcagagcgatagctctgcccttatcacaggcaggggaaacacacagatggctgctgtctcccacaagtctcccactgcaggagatgtttcctcttccccgtgggacccacaatgagtggcacctgcaaattccactcttctagccagtccaaacccgagtcttcttccacgtctcagccatggggccgaagagagggagggggacgtcagaatcagccctttctgtccaaacccccttttctctaggtcttgtctctctacaccctccactttgccaaagccaggaaggaggtggccgtaatgaccacattgccactttcccttggtctttctgtggcacgaatgctgtacgtcgtttcctgcttcctgcaactgtccgccagtggcttcagtggaaacaatcacagacctcgtgtattgagtgctccctgtgagccagagctccactaatcaggccacacgaggaattcattttcctctcaaccatcctaggcagtgtggacagttatcaccacttcacaaatgagaaaccgaggctcagagagatcattttgggttctaagattgtctaagctagagtatggaaggggtaggatttgaacacaggtcatttgaaaacaaaaagctgcatccttaagcagtaaaataaggttcctcagctaatggtcctgttgtctgcttgctctctcttatactctttctctctctctctctctggttatatctgttgaatctttttccaggcatctctttggtattgccctgtaaggctgctcttcttggtgttggttcccccaccctcaactccgtgcttcccttctcagcactctacctgttctctgtagcccacttttatccctatggctttgccccatccacaagcaaatggctctcaaaatgaaaattatttccctacttcagatttttctcctgacctctacagatctggccatctcccgagcatcttaatctgtggggccgcaagaggcctcgtgctcagcgtgcagaacactgaagccacgatagcttcctaacacttgcttccttccccgagtccctgtcgtactgtatggcactatcatgggctcactcaacagagccggacattcaggggtgatccttgacgtccccctcttcttcatccccacactcaatcagcaaccaaatactatggattctgccttcctagtggtcttaaaaaccagccctctcttgctcatttccacatccactgccttattcaggctgtcatcccccacctagctgacccgcagcctcctggctggtcctcatgtcaggtagaaagcatccaatctgcctcctgagtgatatttctagaagccaatctgatcacgttgctgctcaattttacctcctgctctggctttccctgaccctagcatgaaagatgaacttcttggtatggcccgcagtgccttgcatatctccccgtcctccccactcaccccagtttcccatgcctttgagcaagcgtcagccatgctccctccgacaagcacatctatcctactctcttctgcttggtgaattcatctgcacagtctaagctcaaatgtcattagattcaaaccttttgccgatctcctgtcctcctgtttgtgtcygctctgtgccctgcatgtatttgtgtgccatcataactataagacggacggaacttaggtgattatatgtctatttccttatcctggaaggtgagctccttgttggagagatgtggggcttatacactgggattctcatctactgccaggtccccagtgattattcaataagtgttttctagaagaaggactgaaggaacagaggagtcctcctaacctgatctcccgctctcagaaatggaacagagtccctaaaaggatcatattgaagagactggactgcattgggggtagccaaggttttcatgcttccaaagggcccctaatatcttttgtaaggaggtgaagcagaccccaagctcataccacccgtcctctttcttccctctagccactctgcaccctggaggtaaacatcagaataaacgatatcataaccgtgggctggctcggtgaactatgagtattctaaaccaagatgtgatcttagatttagtgggaaaaaaacactgcatgtaaagccaaaagattcgggcttgagcctggcctctaggttgtgttacatgtatgacctcaggtggtcgtgggacatctctgagctccggttttatcaacctgggaatgaaaagtattggtcacttacttcctggggttgctctgaggctgagtaaagttagagaatttcttggtacttgtatggtgctgaggaagctccattgtccctttacccagcatccttcatggcaaagagaatgtgcctgctgacacctctttcagcctctgtttcagcctctgcctcagtccttgccagagacgtcaggcttagcacagagcagctgggagccttcagcagagaaggaaggcaccrcttagacatctgcacgggcagtttttaaacatagggaacatgaaggaaataccacagaatttatggagtgaaagctttaaaaagaaacacaagtctgaagtcaaaacagttgactcaattctaggggagatgtctgcctggaagtaggagtgggggaaaaagacttggagtgagtggagacagggtaagcaaagctctgtggggagccctacaaagtggggcaagtgggcacctccccgcatggctcgagacggaaagtcggtcctgcctgtacacagggtagcacttaccagcattttggaaacacacatctttgggcccagctgttccacttttaagaatgtcgcttgagatagcctcatgcaagggcacaataatatatacaaggatgtccactgaagcctcattagaagttgagaaaacttggaaacaactcgaatgctgtttagcagaggataggctaaacaaattacaacacgtctgtacagtggactgaagcagcaaacggcgttatgtctctaaatatgaacaggaaacatattcattatacaataagtgagaaagaccagttgcaggatggcacaggtatgatgatcttgtttccataaaaactaaaaatatacatatgcctgtgcatgcatggaaaaatacaagaggataggaattaatttgtgaccagagtttgtcagtgggagttgggattataggatattttctgtacagttgtgtagagttgattttttcttttctttctttttcttttccttttcttttttttttttttttttgagacagagtcttgccgtatcatccaggctgaagtgcaatggcgtgatcttggctcactgcaccctctgcctcctgggttcaaatgattctcctgcctcagcctccaaagtagctgggattacaggcacctgccatcatgcctggcaaatttttgtatttttagtagagacagggttttgccatgttggtcagctggtcttgaactcctaacctctggtgatccacctgcctcggcctcccaaaatgctgcgattacagacatgagccactgcgcccagcctgagttgatttttttttaatagacatattagtaaaagaaaaatatacagaaaatagtgaaattacgggaaatatggcaactgtctgaccttcatcctagaaaaaccctgatcagtgtccctgtattgcatcacaggtaccaaaattgtaatacatccttcatcatgctactgtcccagtaaaaaccccgagcatctctcatttcttcccttccactccatcctggctaatttactgtccacaattcacagagtattgtctccactctgcgcagccacagaatggrtgtggtaacgtctccatggcatttatggtttctacaaatcacaaatcacatatgaagggctccaagaatattagaggaatgagccagttaactcagcgcccatgggggagctggcaactccccaagaaagctggacatctccaagctggccaccaacattctatagcctctccatgagcagggtgggagctgtgctgggtgcacagtgccatgtccacaggttgatgtgaggggcacgttctaaatcaagtgcctgagaagggcttcggagacctagatcctatccctaaacaactatgggacagtgtaccggtcactttccctttctgggtttctgttttcacctctgtaaaaaagagtaaggcttggtcagtgtttctcaaagcactctccttggaaaactacatctggkatatgttataaatgtccctgaagaggcctttgtggtaaaatacacttgagaaatgcagctctctgcatcgtgctcttggagatttccaatgcatattagcaggttagagtctctgaggtctggcagtaaataaacttacttatcaatgcttataccagcaattctcatgtttatttcaccttggcatcctttaagatattttttttctgagcatcttggttatacatacactgagttaagtgttatccacagtcactgctcgctccctgaatccgtgaccacgatgagtcaccctccatgccaccccctccatgctgccgggccatcatcctgcagtgttcctgtggctgaacatggattatttcaggtgacccctggaaaaaacgaagctctgttttgtgagagagaatgggttagcctctcagtacagatcccgatggaatgggatgaaggagaggtagcctactgaaaaaggagaggggtggggagtctaaaagggcttgaaatgcagccaggagcagccagatggggtggtgcagttgggggacactaagtaggagtgacatggagggacactaataagcagggaactacagaggaataattttcataatacgtctgttaaaaacagggaggcagggcaaatggtcagaaggaaaggaaggttcttggcacctgtgcggttcactatcttatttgtggctgtaactcatctcttcccctggatttaaataccaaatttatgttgatggcttccacgtttgaatataatctttcgaggaagagcatgggctttagagtcatacagcccatgcctcagtttcttcctctgtaacttggggctaaccataagatttacccgctaggtgtgtgtatgaggattaaatgagttgacacataggaaagctcctagaataactagtgtgtagtaagcactcaaatgacatgatcatgatcaattgttattattcatattttcagccatcagtgctctctggctcgacacctccactcagatgtctccagggcatctcaggcttaacaaaactgaatcagaattcttgattttcccaacaatacctcacctttcccagactccctgtttcaatgaatggcacctgatatacctgtagctcaagtttggaacctgagggtcaggtgtggtcctcctttccccttccctttcatatgcaccccaccaggaacttctgcagagcatgaacccacccccaaaatatatttcaagtccatctacttcttcccacctccctctctcctctagccaagcatcccttctctctgggtgaaggcagcagccttctgtgtgccctccctgtcttttctctcactcctttccagggaatctgcacctgtgaccacagccttctgtaacaaatgtacctgtgaccatcctaagacctgtgggggcacagaaaaggaagcccatagctacccctgctggcttttggtgtccatttgcatgaagtgtctttttccacccctttactttaagtttacatgagtccttawgtgtcaggtgagtctcctgaaggcagcagatagttagttggtgagttcttatccattctgcagttctgtatcttttaagtgcagcatttaggccatttacattcagtgttaatattgaaatgtgaggtaccattgcattcatcgggctctttgttgcctgtgtacttctttgtttgttttttgcttttgttttttaacttgtatttttgttttataggtcctgtgtgatttatgctttaaagaggttctgttttgatgtgtttccaggatttgtttcaagatttagaactccttttaccagttcttgtagtggtggcttggtaatgacgaattctctcaggatttgtttgtctgaaaatgactgtatctttccttcatatatggtgcttagtttcactggatacaaaattcttggctgataattggtttgttgaggagccggaagacagggccccaatcccttccagcttgtaggttttctgctgagaaatctgctgttcatctgattggttttcctttacaggttacctggttcttctgtctcacagctcttaagattctttcctttgtctcaactctggataacctgatgacaatgtgctgaggcaaagatctttttacaatgaatttcccatgtgttctttgtacttcttgtatttggatgtctaggtctctagatggctgcagaagttttccttgattcttcccccaaatatgttttccaagcttttagaattctcttcttcctcaggaacaccaattattcttaggtttggtcatttaacataatcccagacttcttggaggctttgttcatattttcttattcttttttctttgtctttgttgaattgggttaatttgaagaccttgtctttgagctctgattttctttcttctacttgttcaattctattgctgagactttccagagcatttcacatttctaaaagtgtgtccaaagtttcctgaattttcaattattttttctttaagctatttcattgaatatttctcccattcaatattgggggattgtgttgggagaggagggtctccctttcccacttcygcaaatggggcactcacagtatttggagtgtcttctgggtcctgcaggagcagtctggttccttcagagagtctgtgggtccttttgggattgctggttttttcttgcagttgatctggagctaaaattcaccatggaagcctccagatgctgctctgtctgaagctgcaatctagtcctgccacccagccactatgatcccctccatctctctgtccactttagtcagataagctcaaagctagaacaaaggacccatatatgagcctacggatctgccttcaaacacttgagaagccctccaactcaccatgagaacactgaccccaatcgggatctttgctttgctccaacagccagacactcagacaggtcctcagacccagcaactaatggacttggtgggatggttgtcctcaaagcagccagcattttgatcaggctggcgtctggtcctgtatttttctgggatattcagaatctcttgacatgtatcttcacttaattgtgaatttaaaaaattatagatggatgtagatatagatatagatatagacatagagatagatatagatagacattttggagaagagtctctctttgaagacttcctctcagagtacaagtccgtggttacaaccattttgtttctcagcaaacatggggaagtttgcttttcttctctgaggaagttaatataaatgtttattgacagtgcagtcatcaaggaataaagttgctgattcattcctttacactgaaaccctttgttgtgccctcctcttccttcctctttatagggagacactctgagaaagagcacattgtgggggcccactccatgtgatgtttgcttggttgcctgttcccttttctacctgcagagcacggttcccataagggcggcgagatcagcctcctgtctcatctggaagaccaccactctggggtctcagaggaatgatggaagccttggggtttctaaaattggaagtgaatggccccatggtgayggtggccctgtcagtggctctcttggccctcctgaaatggtaagtgcagccagccctagggactgtgacagcgtcagcyrtctcaccctggagccttgctggtgccatggcggggtatgtgggagtgtgtttttcttcttttctaatctagcgggagtgagtattaacacagcttcagaattaaaagcaaacagccaggttaatcttttgctaaaatgcatgagattgaagtgtcaggaaaggctggtgattcagtgactgagaacgctacacataattaagtttgaaagagatggaaaaagaaacaaattggaaaggcattaggtttgggtagaagcatttccttgaaccccgtcatatctcctcacctcatttttctaaaatcctctgtccttgttggatttacagtgaattcagcctcttggttcatattacattcaaaacaaaacaagacgtaggagctgtttggcaaatgtgggcctctttgcaggaagtcattgagggggatttctgtagggttaaggacaaagtggtagatctaatttctcatagttgatagagggagatggattctgatgaacatagtgtgtgcagctcctacaaaatttgagaccctgaaaggatctcaaacttgaactccgagttgctcccctgtggttttgttaattcaacagcaaattttcctaagsctgactctggtgtctgtaggtcgaaggcctcataatatgctacatttatgcatattcgccctgtcagttaaacttattagagttacccattcaatcaaaagcacctggatttagatggctctggcttttgagggcaaagtgagtggaaaaaataatggagractggagtccgaacagaattttaatttatgttttcagtagtaataaagccttctctagattaataactgggaaagcactttgaaaagcatcaagcattatgcaaatgtgaggtattattcttttggaatttgcatagctgagagtggaattcacgtttgatgttctatgatgatgaaattacttcttggaaattggctctgaaacccagcctcagtcccagtgctgtttttctttttaactggtttaattttttttttgaacttttttatctcattgtagcttaccttggattgaaactggccacatgtaaaaccaagagcaaatggtagctccttccctacccccagcccccaataatccatctcaatgtgtttttatgctccgggaagcccgaagcacagtgtctgacatgcagaaagtgcttagtcgatgtcagccactataattaaccatctatcatctatgtaacctaaaagaaaataagtctttagtggtttaggtttatttttaatttcttactaatgtgcttattcatattaatctcatcaatagctatgctctgactgtggttctcaaagcggacacttttttacacttttgtttcagtctttgttgtgtctgagcctccagctcagtgcctgccatgtaggaacaccacaccattcagcagggcagctatgtgtttgctgtctattcttgggccatattaataacctggttcaaagatgcagrgattaagataaatgtaccaagcagaagtggtaaacaggaagtgagagctgacttctatttgttattgcaaaaatatttattaacctgttaatgtgtgcccagtctggaggaggccctggtacaaggtcaggaagcaggagatctggagaaggtgcccaaggcaggggagacacagaggttctgggggtgagctggatgtctagagaggatactgcaggaggagcagaggcagcaggagagaggtcacggccctggctctggtgcttttgggtccatcccttgattcagtgcaaggggaaccacccttgggctttcaacccttctgttccgggtgagactctagtcagccactaagcaacagccaccagcttgaatgaggcaaggcccccttcctgcttcattgtcttgaaaggatatgtgtggaagagacaggggtgcttttcctccagtgagaggattcacaggcaaggaaagatggaggtgtagagacacttgcaggagaaactggcagggggagtggattaaacattgcagcacattagtctttgctttaagtgttacatgtgccatccagccaggtgagatggcagcagagaacctaaaccctgagaaggtgaaatcaaatgggctgggcgcggtggctcatgcctrtaatcccagcactttgggaggccaaggcagacagatcacttgaggtcagaagttcgagaccagcctggccaacatggtgaaactccatctctactaaaaatacaaaaattagctgggcatggcagcaggtgtctgtaatcccagctacttgggaggctgaggcaggagaatcgcttcaacctgggaggcacaggctgcagtgatctgagatcatgccacttccctccagcctgggtgacaaagaaagactctgtttcaaacaaaacaaaacaaaacaaaacagaaggatgggaggatggagggaatcatggtggacaggaggcaggactagactgcagctccagacaaagcagcatctggaagcttccatggtgaattttagctccagatcaactgcaagaataaatcagcaattctgaggggacccacagaccctctgaaggaagcggattgctcctgtagggcccagaagacaccccaaatactgtgagtgccccaactgcggaagtgggaaagggagaccctcctctcccaacacactcccccaatttgagtgggagaaatattcaatgaaatagatagcttaaagaaaaaacaatagaaaattcaggaaactttggacacacttttagaaatgtgaaatgctctggaaagtctcagcaatagaacaagtagaagaaggaaattcagagctcaaagacaaggtctttgaattaactgaatcyaacaaagacaaagaaaaaaaataaaaaaatatgaacaaagcctccaagaagtctgggattatgttaaatgaccaaacctaagaataattggtgttcctgaggaagaagagaattctaaaagcttgcaaaacatatttgggggaataatcaaggaaaagttccccagtctagctagagacctagacatccaaatacaagaagcacaaagaacacgtgggaaattcatcgcaaaaagatctttgcctaggcacattgtcatcaggttatccagagttgagacaaaggaaagaatcttaagagttgtgagacagaagaaccaggtaacctataaaggaaaacctatcagatgaactgaagatttctcagctgaaaccctacaagctagaagggattggggccctgtcttccagcttctcaaacaaatcaattatcagccaagaatgttgtatccagtgaaactaagcatcatgtatgaaggaaagatacagtcgttttcagacaaacaaatgctgagagaattgccattactaggccaccactacaagaactggtaaaaggagctccaaatcttgaaacaaatcctggaaacacatcaaaacagaacctctttaaagcataaatcacacaggacccataaaacaaaaatacgagctaaaaagcaaaagcaaaaaacaacaacaacaaaaaaaaccaaagtacagaggcaacaaagagcccaatgaatgcaatggtacctcacatttcaatactaacactgaatgtaaatggcctaaatgctccacttaaaagatacagaactgcagaatggataagaactcaccaaccaactatctgctgccttcaggagactcacctaacacataaggactcacataaacttaaaggggtagaaaaaggcatttcatgcaaatggacaccaaaagcgagtagagcaacggtagctattctcatatcagacaaaacaaatcgtaaagcaacagcagttaaaagagacaaagaggggccgggcgtggtggctcatgcctgtaatctcagcactttggatcacaaggtcaggagttcgtgaccagtgtggccaacacagtgaaaccccgtctctactaaaaatacaaaaaaaaaaaaaaaaaaaaaaaaaattagaggggtgtggtggtaggtgcctgtagtcccagctacttgggaggctgaggcaggcgaatcacttaaatctgggaggtggaggttgcagtgagctgagattgcaccactgcactctagcctgtgtgacacagcaagactctttctcaaaaaaataaaaaaaagagagagacaaagagggacattatagaatggtaaaaggccttgtccaacagtaaaatatcacagtcttaaacatatatgcacctaaaactggagcttccaaatttacaaaacaattaaaataggcctaagaaatgtggtagacagcaacacaataatagtggcagatttcaatattccaccgacagcaccagacaggttagcaagacagaaagtcagcaaagaaacaatggatttaaactataccttggaacaaatggacctaacagatatatacagaacatttcatccaataaccgcagaatacacattctattcaacatcatatggaactttctccaagatcgaccatatgataggccataaaacaagcctcwataaatttaagaaaattgaaattgtatcaagcactctctcagaccacaacagaataaaactggaaatcatctccaaaaggaactttcaaaaccatgcaaacacatggaaattgttaaataacctgcttctgaatgagcattgggtaaaaaacaaaatcaagatggaaattaaaaaattcttctaactgaatgacaataatgacaaaacctatcaaaacctctgggatatagctaaggcagtgctaagaggaaagttcatagccctaaacacctacatcaaaaagtctgaaagagcacaaacggacaatctaaggtcacacctcaaggaactagagaaatagaaacaaactgaacccaaacccagtagaagaaaggaaataaccaagatcagagcagaactaaatgaaattgaaacacatacacacacacaaaataaaagataaattaaacaaaaaactggttctttgaaaagataaataaaattgatagaccattagcaagattaaccaagaaaggaagagagaaaacccaaataacgtcactgagaaatgcaacaggaggtattacaactgacaccactaaaatacaaaagatcattcaaggctactatgaacacctttacgcacataaactaaaaaacctagttgagatggataaattcctggaaaaatacaatcctcctagcttaaatcaggaagcattagataccctgaacagaccaatacaagcagtgagattgaaatggtaattaaaaaattaccaacaaaaaaaagtccaggaccataaggattcacagcagaatttaccagacattcaaagaagaattggtaccaatacttttgacactattccacaagacagagaaagaaggaaccctccctaactcattctatgaagccagtatcaccccaataccaaaactaggaaaggacacaaccaaaaaagaaaactacagaccaatatccttgatgaacatagatactaaaattctttttttttttttttttctgagacagagtcttgctctgtcgcccaggctggagtgcagtggcgcgatctcggctcactgcaagctctgcctcccgggttcatgccattctcctgcctcagcctccggagtagctggcactacaggygcccgccaccacgctggctaattttttgtattttttttagtagagatggggtttcaccatgttagccaggattatcttgatctcctgacctcgtggtccacccacctcggcctcccaaagtgctgggatttcaggcgtgagccaacacgcctggccaatactaaaattcttaatgaaatactagctaaccaaatccaacaacatatcaaaaagataatccaccatgatcaagttggtttcataacagagatgaagggatggtttaacatacaaaagtcaataaatgtgatacgccacataaacaaaattaaaagcaaaaatcatgtgataatagatgcagaaaaagcatttgacaaaatctggcatccctttatgattaaaattcttagcaaagtcagcatacaagggacataccttaatgtaataaaagccatctatcacaaacccacagccaacctaatactgaatggggaaaagttgaaagcattccctctgagaattggaacaagacaaggatgtccactctcaccactcctcttcaacatagtactggaagtcctagccagagcaatcagacaagagaaagaaataaagggcatctgaattgctaaagaggaagtcaaactgtcactgtttgctgacaatacaatcgtttaccttgaaaaccctcaggcctcctccagaaagctcctagaactgataaaagaattcagtagtttccagatgcaagattaacatccacacatcagtagctctcctatacaccaacagtgaccaagcagagaatcaaatcaagaagtcaaccccttttacaatagctgcaaaaataaataaataaataaataaataaataaataaataaataaataaataaaatacttaggaacatacctaaccaaagagttgaaaagcctctacagggaaaactacaaaatgctgctgaaagaaatcatagatgacacaaacaaatggaaacacattccatgttcatggatgagtagaatcagtattgtgaaaatgatcatactgccaaaagcaatctacaaattcaatgcagtctgcatcaaaataccaccatcattcttcacagaattagaaaaaacaattctaaaattcatacagaactgaaaaagagcctgcatagctaaagcaagactaagcaaaaagaacaaatctggaggcctcacattaccttatttcaaactatactataagcccatcatcacccaaacagcatggtactggtataaaaataggcacatagaccaatggaaccaaatagagaaccacaaataaacccaaatacttagtcaactgatcttcaacaaagcaaacaaaaacataaagtgaggaaaggacacctttatcaacaaatggtactgggataattggctagccacatgtaggagaatgaaactggattctcatttctcactttattcaaaaatcaacccaagatgagttaaagacttaaacctaagacctgaaactatacaaattctaggtataacactgtaacaacccttctagacattggcttaggcaaggatttcatgaccaaaaacccgaaagcaaatgcaataaaaacaaagataaagagccgggacctaattaaactaaagagcttctgcatagcaaaaggaacagtcagcagagtaaacagacaacccagagtgggaagaaatcttcacaatctatacatctgaccaaggactcacattcagactctacaatgaactcaaacaaatcagtaagaaaaaaacaatcccatcaaaaagtgggctaagaacatgaatagacagttctcaaaagaagatatataaatgaccaacaaacatgaaaaaatgctcaacaacactaacgaccagggaaatgcaaatcaaaaccacaatgcaataccacattacttctgcaagaatggccataatcaaaaaataagaaaacagtagatgttggcgaggatgtggtgatcagggaacacttccaccctgctgrtggggatgtaaactagtacagccactatggaaaacagtgtagggattccctaaagaaccaaaagtagaactacctaccatttgatccagcaattccgctactgggtatctacccaaaggaaaagaagtctttatttgaaaaagatacttgaatatgcatgttcatagcagcacaatccacaattgcaaaatcatggaaccaacccaaatgcccatcaatcaacaagtggataaagaaactgtggtatatgtatatgatggaatactatgcagccataaaaaggaacgacttaacagcatttgcagtgacctggatgagattggagactattattctaagtgaaataactcaggaatggaaaaccaaacaccgtatgttctcactgatacgtgggatctaagctatgaggatccaaaggcataagaatgatacaatggactttggggacttggagggaagtatgagaggtaggcaagggataaaagattgcaaatatggtgcagtgtgtactatttgggtgatgggtgcaccaaaatctcagaaatcaccactaaagaacttactcatgtaaccaaatgccacctgtgccccaacaacttatggaaaaataaaaaaacaaaaacaaaacaaaacaaaaaagcaaaaggcacaccaaggttgcttcttgtgctctcaaccagcctgtgagttctctaagggtgagggccaggtctcctatctcattacagttctggaatcttctgccaatggcagggatgctctgctagcatgtggttgaaggtggtaaagtcaagaagtccacaaccatcagccccgccccaggactcactgtgggtctcctgctccttcagcgggccccctgtcgctctctcccccacaaaccctaaggcctcctccagaaagctcctagaactgataaaagaattcagcagtttcttttatcctgggctggggtcagagcgacgctgtctgggtgctgtgaatggtcctttgttgctgcatgaggcctcctctttccttcaactccaagctcaggggtgcttcctcagggaagtgttttctgtttccaaaggcactgaggagccccctctcagcattgcttttatcccatctctgtccctcacaatgcctggcacatagttggtgcctaacaaatgctgactgaaggctaattccaacctctaagctctgcctggtgctttcttcctgtggttcttctcttggccttcacagttccatacagatctaaattctcttgcccatgtgacccactccctttcctgaaagcttgctgtgttttcagtttgtgtcaatttgccatgcactgttccagttgttgaagatggactgtttttgtatcctttcttatcctgtagagcagacaccatgccatgtacttaatgcacacttattaattattaggtgtatgcgtgaatttggaaaaaagacaaaaaaaatctttcatttaaaaagacactgttttaaactaggcacagtacactttgatcgttttcccraaaccgcgttggacaccatttttccatgatgatcatttgatttaaaccgaccagtgtgtggctgagctctgtgaactggggcatcaggggatcagggctgcaccaccagggctggagatggagctggggatagagactgtattagctggaagtacatggagcacatgctaagacgattaacacacaagataacacattttaaaaactaattttttcccatataaaatggtttaaaattcttacttctggaggagatttgatggacaagaaatgagttgtacgagttgaacgttgctcgaggcaaccgtaagtcctagcgtatttaatctttcaagcaacacctaaggactggcagctgggttcctgtggggaggataaagattgctttattctttaagatccagtgtaaagaaatagcccagatagcaatagtggatttctttctgggatggggttgtgggtgatttcttttcccttcttttagtctttctgcatcttttgtatttctttaatgagtgtgaatatttagcaaaaaagagaaattttactaaaaagagtgggaaactgctcccttctagtggtraaggggaaagcagtttcatgctttaggcgtgaggtttcaggactgtagtctaattatttcttccagtggagtagaatgtctgaaaggatttggagtaacagggctgatgaagyggcaaggaaggtgagtagctatctaggcaagtatgtgaacacagcctggaagggcttgtagtaccaagctgctcttaaagctcaggtaccaagacccagaggtacataatcaattcgacatcaaaaataggaattcaggctgggtgtggtggcttatgcccaaaatcccagggctttgggagggcaaagtgggaggatcacttgagcccaggagtttgagaccagcctgggcaacaaagagagwccctgcttctaccaaaaaaaaaaaaaaaaaamcaaatcaaaaattagccaggtgtggtggtgcgagtctgtaatctcagctacttgggaggctgaggtcggaggatctcttgagcccaggaggttgaggatacaatgagctgtgattgcaccactacactcgcactccagcctgggtgacagggcaagatcctgtctgtagtcccagctacttgggaggctgaggcaggagaatcacttgaacccgggaggcagaggttgcaatgagccgagatcacaccactgcactccagcctgggcaacaagagtgaaactctgtctcaaaaaaaaaaaaaaaaaagagatttcagatagagagtgagttagtgttctgatcaagtctcattctaagaccagtttaaattgaaatgtgattggtgattattaagatttaagactatcacagattattaagacttaagtttaccactatgcstggaagttcctttcccagagagtttcttctacatgtaagaactggactctaattctagacccacatctactccagactatatttagaaggcaccattgggatggaatatgggagccaagatgagaaatctgaagaggaagaagccatgtaggtattccctggcacaatgggaggtgagctccggaaaaggcatcccgcctccagcatgtggggactgaagatcaatttgcccaccatttcccaacttcggttcctaaaagtgtttaggaaattaagtctaaatcaagcccttcttggagattcatagaatatcaaaggccctgaaaggttctttaataaagaaacctgttcagcttyatttaacccagtgttttcgcagcgtctttgctaaagtactgctgcatatggccgtggtgggttgggcaactagacccgctgagatggtcccttgaaaacggcggtcggatgcattggtagctgcacaaccagtggaaatggaggggccacaaaacggaggaataagacattcaaattgcccctttgcaagctctgaggttccagggttgacgtattgtttccttcagggcacagaaaatatggagtctagcgaacagaagcagggcccatgcgtaggggtggtccaggtttacaccaaagaaaatgartactactcacagctgtctggcaaggtggcaagagagcgcctcggaggtcgtgagtgtccctcaccatccataggaatgccacaaaagcccttgctgccaggcatgagcagctggtacagaaggccaccgagtgccttcccgatctggactccgtgacttctatgcccactggcgctcttgcatgggtcagtctgtgctgccgctcaggaaaagcaagtcaggtgccataccagcgacccaatggcggctgctgcttcttctgcctgggcacctcatcatccccagcagtagttcctaggtgtgagcgtggcaaggagcccagaaatacagaagsagcgtttaggggcctcacggtagcttcatgcctgactcttttctctcctcttccggcctggcctctaggcctttctggatcgccagccagtcagactctacttcgagaagcagaaggtcttgggctgggtcttgaaatgcagggaagaattgacttggcagaggagaggaaagagaaaatttcaggtggggaagtaccccaggcaaagacaacattagtgtttgtaacatttgctggaacaaaacattaggagtgtgaataatggacacagtttagaaatacattttaaaggcatggataattttcagtgcctccaagcatctagagagggatacatctatttcccttttttttttttttatctttttgtatttttgtctaggatatgatgggtacttcgatttaataactcagtgatgagcttggagataaaattgagcctgctgtgaaaactaggtctgtggcttccttgaggaccatttctacagaatattattttttttgttttctctctcttaaatggttatacacaatatccctatccttctcctcactttattgattttccagaatgagagtacgaggtatgactataaagtaacgtgactgaytattttagcatacactccaatacttatacagccaaatgaattttatgaccttcggaggcattttcctgataggctaaacccttactgcagatatgccactatcagaaaacacattcttagcactttttgtgggaatggcacttggtgcttagatgtggtcctttgaaagccctcaacgcaacacatctttgtggagaatagattgattttttttaaaaaacagtccatattttggcaaatagatgattaaacagagtaatattatttgcaattttaaaaatgtgattataaaacaatacacagcttgcagaagaggtgtatgaaccagttctggaagcctgggaattttgctgaggggccacgctcactggcatacgagttggtttttggttttggttttgttttttaaagaaaacaatagcaacagtcttaatatttatggtcataccttctctcgtctagtaaggaattcaggcttctggtagcatctgttttgggggcagagatgaaagaagaatcttatttgttgtataaacaaagcaaaacatcagattgatgtgtgtccattactgagctgcgtgagtgggtgctcagcgatgccttcccgggaaggaagtgactctcccagaaataaaatgattgaatgaactcttcccctaaccctagtgccataataacaacaaacctaacaactatcgcttgccactgaagggaagtacgcggtctatgggaaccctggtagccttatatggacttgttttttggttgccggaataacatgcatctggacatgggaatgagactggcgagaaagggagggggcagatgttcacactggtattcattggtgcttcaattactaagagccacatctttcctggtttaccagaaataggtgctgttgcacaacttcctggtggatagggtaggggggtgttagctgataggggagttccctggagccctcgactctctctgttgctttcagcctcagccctcagtgcagagtttggccctggcccgcgctgtggggccctcctaaacctcccctatgtccttgcaaaggtgtgcttcttaggtttcgcttgagcagtcagccagttcctcaacacaatctcagaaagaggccggccccttttttcccctcgaagatatctagaaaaaactgtgtcagagatgatctgaaagcaaagccaagctctaccaatagtggcttccaccaatgccttgtttccctgagcactgcacacagaccccctgggagagccagcgccataccccgaaaccagcagctgcctccacattctgatctgaaaggtgccctaaagtcctcgcatgtgcttccctccttcctgcactgacatgcctgttccctccaagctgcacagcgcagtccctgttgcctgaatgctctcccttcttggtttaactgaactcctgcctaaccttcaaaatcttgtctaaatgtcactcttccataaaggtctcctccatcaggccagccctcaaccagccctgcctcctgtggacttgcttcctatctctctggctatctcggcacttactactttactttatttatttatttatttatttatttatttatttatttatttagagatggagtctcactctgtcatccaggctggagtgcagtggcatagtctcagctcactgcaacctccgcctcccgggttcaagtgattctcctgcctcagcctcctgagtagctggggctacaggtgcgtgccaccayacccagctaatttttgtatctttagtagaggtggggtttcatcatgttggccagtctggtctcgaactcctgacctcaggtgatccgcccacctcggcctcacaaagtgctgggattacaggcatgagccacagygcccggcccactttattttatagcttatgcatgtgacctatcttcttggcttgactgtaagtccctaagaggagggcccacatcttaagccagtgagtgccctctacatagtagctgctcagtaaatgctaatgatcatgattatgcctctggtaaccgagatagcagcactgtttccaaatgattactgtgacaatgtgtgtgtgtgtgtgcatgcctgtgtatggaagagggtagaatcagtctccccctaattgcacactagtggtagtgtgttcttagcacctggcagaatgccttgcacaaggcttattgaaaagggaaataaatcttgattcatgcaatcgtcgaatgctgaaggttttctaggctgtgagctggttctacctcattggtgtgctatggataacattcccatgaattcagatagatagaggaattgccccatttgaaattgaagagcaagactgyaaaaggaggggatgatggaatgcaggacccagccacttagaatacgtggtacatgggggtatatagagcactcaaagtctgagtggggtatcctgacaccagactaggggacaggaggcatccaacccccagcagaggcattgaagaacagacactttctccttcactgttctattgagcacaaatccccacagtttgaagcaatggtatctcaactcttccctaccatccactgttgatgtgatttttccccatagatcctatgttctgttgtcccagcaacaatgtatatttaagtaatgattgattaattttcccattttaattattcaaaggcaagctaattggaaaactctgccagttgagaatagctgatcaatgagataaccagcattagtgtaccaaattataattccactccaaagcaaagaaactcgacattttccttaacctgcaccaccatcgcgttgtcaataaatgcacgatttacattaggctctttgaaatattgaaaatatctcatgtaccctcttcctaccttcacaaatcagtaggcacctgggaaccccaggctgtaaagcagtgaagagggagtgtagtcagttgtacatttaaggattttaactccatccgtacacagagagtgagcaaaattggtagcatcatctcatgatctaagagcgtacctaaggagataattgggaggttctcaggagaagtgtggcattgtggaaatcagccaggcctttacagtgtagggacagacacacctctttccctgggtgtccttgggccagccactccctccttgctcatttcctcattggtgagagagggctgggacacctgcctctcagcattggcacattttcccccagccccccaggctatgctgggaatcagcctcacatctttcttggctctcaccctaatgttaaccctccacagtctggccagtcttgactcccaagtgttcctctctctatctgctttgcttctgctgcagttgaggacttcaaaatcactccttggctggaaatagccttcccacgggtctccctgccttctatcttgtgctcccctaatttgtcctgcaactgcagccaccggctcactgctcctctgcataaaaccctttcctggtcctcctgtctaaggaagtgagtgttcctggcctggctcctgaagccccctctgacctggtcccctgcccctctgcaggtttaactcccctcgcttctcacctggtgcctggctcccaggtgctcacagctcctcccacacaccatgcagttcagtgccaatttctttccttctacttgcatgtccttcccccttcatttgggtgagaacttctccaggagcctcttctgcatctcctaggttcttgccccaatgtacctggtaccttccctctctctcatcacttacctggctccccaagggcaggattggtccttcctcakctttagctgagcactcagcattgtgccaggggcactcaacacacttctgttgagtaataggcacgcagttacttgttgaaccaaactgcgttagaagagatgatctataggattttgtgtggcatatgcattgttctttgccgctatgggtatcatcatagagaatttccattaatttctggccgtgtgccactgcaaccagctttcaccctgacttgtcatataacaaaatatcattaaattgaactctagttttttttttttttttttkagacagggtcttactctgttgcccaggctggagtacagtggcacaatcacagctcactgcagcctcaacctccccaggctcggggaattctcccaccccagccccatgagtagctgggastacaagcgagcactaccaccccaggctattttttgtatttttttgtagagacggggtttctccatgttgcccaggctgggaactctggatcttaataaaatatttttttctttagaagtcaggctaggctgggctgtgggttgaagttcatctctgtgctatttatgaaggaagggattgctaaccaaaatcattgtgcaaaggtgacagctcaaccaatttaggaaaataaactactcccgagcacttcggcagcttgctagtttatcaacgatcccttgaaaacgcactaaaaacacttcactctttctgcctttccacactttctataatggcccagggcttaggctttggaatcagatctcctggattcaaactctggctagccttgtgaccttaagcaatagatgtcaggtctccgtgtctcagtttccccatgtgtaaaatagggatactaatagtacctacctcttagcatgttgggaggattacatgagtaagaacataaggtggacttagagcagtgcatggcacagctcagggtcaataaacattagctcttagtgttatctgataactgcacgcttatattcaacaaaaactgcatagacgctgggcagctagatcttggtttttattttgtttatctagttattttgtaaacctcattctgaattctcacctgatccccaggaatgcactgcagtgaaaagtgaggagaggcgtacttcaaacaagtgacctcattttgaataatcctggacttataccactaggtagcttttgaccttgaacaagtaaaattaggttttaaaaatgcgtatcagacttagtaagctgaagtgtcttcgggggtgttggggatggtcaccaatggtgtggtggggacagagccatagtgcggcaggtttagaaatgatggggaaggagggcagatgaaaagaagactgtgggcttttctttgaagaaggtcagagatgtcagccacctctctgggcttgatcacttttccatacggtcaagcggagatagtcattctctccctgtctccttgaaagggagtatgagggtttgtgagcaataamccttacaccaacatatattgctattagtcyattgatggcatctgtttacctctcagttgtaggtgcttcaaaattaaagaaaatctatttcttgaaaagtgcacaataaatcaagctttaaactcaatttgttttccagaaatttttcaaattttcccatgacaaaatttacatttattttctgattttaacagtaagagtaccattctaattttcatckggtctttgcttcattggttgacatttgccttgcccttggacttgagaacttgaagtatcaatgaggcatagcacatcagtaaataagccccgctaagccatactctattctcgcctgttgaccagatcttttgtttcctgctcactctcatccaagcccttacccacatcattttcaatgatggtgtcactgcaaatgtttctttgcaggttcaattctctcctatcataaaacaaacaactgagccagccaactaaccaaccaaccaaccaaccaaccaatcaaccaaccaactcactaaccrcctcttctttgactccaccccaggcaccactccacttatccttctcttcccagcctagtgacttgaaagaggactttgtatttgctcactttctcacctcctatttacccccgacccctgcaataaggtctctgttccattctctactgaaacggctttcttcaaggccaccattaagtctctagtacctaaactgaattaacagtttctaatccttctctttctttggcactttgcaatatttgttgtttgtttgtttgtttgttttgaaataggatcttgctctgtcacccatgctgaagtgcagtggtgcaatcatagctcactgcagcctcaaacttctgacctcaagtgatcctttcacctcagcctctcaagtagctagaactatagacatgtgccaccatgcccagttaatttttaaattttttgtagagtgaggtcttgctatatttcccaggctggtctcaagctcttggcctcaagtgaccctcctacctcagcctcccaagtagctgggactataggtgcatgcaaccatccctggctaattttatgttttacttatttatttatttatttatttatttatttgtaaagacaggattttgctatgttgcccaggctggtcttaaacgcctgagstcaaatgatcctcccacctcggccttccaaagtactgggattacaggcatgagccaccatgcctggccgctttgcaacatttgattctgttaattttgggtatatgtcaaagctgtcagtyacgtaggggtagaaaaaaagttgtgcatcattgattataatgccagggccccattttacagatgtgaatatggaggtccagagaagttatgtgatctgatgtgtattagtcagctactgttgcaataatgctgtgtaacaaaccaccccaagctcattggcaaatgacaatgtttatttttctcatggtctgtatgttcactggagtagctctgttccagtctgacagtggggtttagatctgctccacatgtttgtaatgggacccaggctgaagagaatattagggaagtgctgctcctgacaggtcacagggatgcaagaaatgtaaaatgaaacagtaatatctcttgaggcctcaacctggaagctgctaagataatttctgcccacattctattggctaagcaatccacatgcccaaggttaacattaatggggcagggaagaagactctgtccactgtagygggaggcactgcacagtcatggagcaaggggcattgatgtagaattttgatacagatggggcatgaagcatcaggagcagtgattcactctacctcatgctccaagattacacagctggattctgatctttggcaaaatagaatctaggggccacaagtcacaagacaaaataaaaccataacaaaaaaataaataaatgaacaaaaacttaacgtgaatggacatattaacttttattgtaagtgaaaacagtgactctctgggggaaaaaaaacaacaggccaggcatgatggcttacacctataattcttttgggaggctcactttgggaggctgaggtaggaggatcacttgagcacaggawttctcgagaccagcctgggcaatataggaagtctccgtctctacagaaaatacaacaattagccaggtgcggtgacatgcatctgtggtcccagctactcaagaggctggggtgagaggatcagttgagcccaggatgtggatgttgtagtgagccaagatcgcaccactgcacttccaacagcaaagaccctgttcccccmaaaaaaacacaaaaaacaaaaaacaacaaaaaaaaaacaacccaccaaaaaacagaaacaacagatagtgatgcagaattttcccactgagacactgacatggtgggtcatggtgatcttgcttatgaagtgataacctagcttcaagagtgttgaagcagggtccagagctcagtgtaggggccaggttggtcctgggccgaacctggggaygtacctaggaatttctagccaaataagcaatagagggaagggtctgactgatgacggagcatgagcacactctagraagggcaaagaattgatctgggggatgggatggggcggggccctaagatttcaactccaccctggaaaagcaggacttaggggaggcatgtctgaagttcagaagaccaggggaaacctgaatgcagaaagcgcagcttgttcaccatgtcctgaaatacagcaaccaggggacactcttgtagattgtgagctgtattgcttaggacaaattcattgttctatgctgggcagtaaatttatggatgttgttatgccaagaaaggaatatggctgaaaacataaattgctccagaattgttttaaatattctcatgggtgctggaagtcctctgggttattaaggaaaaaatttgtttatttcttgcccttccggaaaccaccctttggtgctggctagtggctgtcagaagaaagggtgtatccatgtatcacaagggctattacacatcgtgaatttaacttgagttctcaaagataaaaagagacacttgtcttgcctccacgctccttctcgtcctgcacatttgtccactcacctccagtaagttgctctggaatctgaacagggaggtttcttgcaatccagaatcagccacaaaatcccatttccttttttcctataaaaaagatgtgctgactgaaacaactaaaatatagactagttagtgtaataacaataagtagcaaaaacaaaatagaaaaacaaagcacaacatgaaaaaagaagtttttgaattagtgtcttctttcatcaaggtcagtttctctccatctcacatcctctgtgaccctagggtggtgtggaagatccttccccacccacacccacacatggggtattatttgggccttttccagggacttctgtcagttctgatggtctttgcactgggctgagtagtgtcccctcgcccccaaattcatgtccattaaaacctctgaatgtgacctgatttggaaatagggtctttacagcggtaatcaagttaagatgaggtcctactggatgacggtggtccctaatccagtgactggcatccttataagaagagtgaaatttggatgctgagatggacagagggaggacgacatgtagatatagtcacacaggcgagaacactgtgatgaccaaggcggagattagagggatgcatctacaagccaaagaccatggattgccagcaactaccaggagatggacagaggcaaggaaggrgctcccttcgtgtcttcagagggagcatggccctgctgatgtcttgacctcagaattctgaactccagaatgatgagaggataatttctgttgttttaagccacccggtttgtggcaatttgttagagaagccctgggtaactagtctggtctccttgctcccrttggtcttactgagccaaagcatcccattggccttactgagccaaagcatcccattgcatcatgtttgttactgtaaccctcaaatctttttcttgacctaactcttagcaagtttagccactggcctttgatcatctcttagctgcaataatcttcacttgacagacaagccagaggcctggctggaggctcaggcccttcattcagacagctcaggaggcctggactgtggctgggccagttcctgtggccgggctctaagtctcagtttccccatctgtataatgcacacaacagggatgttggtagagattacaggacatgatgtttataaagtgtgtttataattttattttgtgggtcagtacaatgcctgacccatagcaagtgcttaataataaatgttagctattattaaacatacagttttctgaaatctttaaatccatttttatccaccccagggtgaagtttccctgatttttcttttccagtaaaagcatggcagatcctatctactctcttagtgatgcacaatgacatctgggctagtgcctgacacagagtaggcactaaatatatttttatggaataaagaatggamcaactacattgtttcaatatctaatcaaaggaggaaatagcttacagattttatgaggcttagtaaccagcttgatacactcaaggtgaaactttggaaaaggatgtaatttcaccacatttgttcacaatagggcacaggtgatgtggtagacagcctccaagagggccctctggatccttgccctggaattcacacccttgcatagctccctcccccattgtaccagggtcagttagcatgaccagtggaatacagcagaggtgatggtgttatcacttccaagattagattattggagactggggtttccatcttgggctcgctctctcccttggattgcttactttggggaagtcagcagccatgttgagcagccctatagggagaggctcatatggcaaagccagctacagctccataagcaagcatggacaccattctccagcttgaccctgaacccaaagcacctagctgatctgctcgcagactcctgaccctcagaatctgtgagataatgaatgtttgttgtcttcagtcacttaggtctgggggcaatttgtgacacagcagtagataactaatataggtgctgagataggaatggctgggaccaggcagggtcaggactgaggactctaataatggaagggattataagttgcagggagcaggcaagaggccaaacccagaaaagtggtctgttcggaaggtcaggcaggttctgtgggtctccacctgtggctgtgttccagaacccagagaggtgagagccagaagcaaacacactgaggaacaacgggcactgagattcagggctcttggactagaactcttgccttttgactttgtcctgtacaatttccagctagacccacaattgatcattatagctaagagatgatcaaaggtcagtggctaaacttgctaagaattaggtcaagacaaagatctgggggattacaggaacaaacatgatgcaaggggattataaatatttttttgaaactcttaacaatattcttttgttactttgagttacccaagctctttaaactgtctgccaagctcaaaggcaaaattggtatttcccaggccttttggacgggtcatagtgcaatagaaaggtggaaatattgsctgggtttatgaagacataacttcttatccaattggcaaacattttttaaatgcctactcggctgggtacaaaagaacctagaattattctgagcacccactaccagtactcaatgcccctgtgtaccaaccttggctactccaatacacacacacacacacacacacacacacacacacacacacacacacacacacagttggccaaagaagcaacctgtctgctctgcacaagccaggtcttcactttactgaagccccagctgacccctctgggctcaaactttactgaagtgaagacctggtctgtgcagaggagataatgacagatttatctgtccttatttcaagtcttgaagccctgttgacttagtggctaatctgatcaactgatttgaaccctggggatagcgtcctgtaagatggcatctgccttttcacaggggactcagagccctcaacccacagacttgaacaaacaggggcttttcgcatcccccgtcttacagataggttggattctgggcaactggctgctctgcaaatgtaaagtgagaaacagtagggcctggtaatggtgagcacagactccagagccagacagcctgggttcgaatctcagctgtgctactcactagcagtgtgaccttgggccagttacttaatctctctgagcctcagtgttcccatctgcaaaacggagataataataacagcatgttccacacagaatttggggaggagtaaatgagctcatgtgtgggaagcactcagccgggctcctggctcacaggaagcatcctgtaactgtttccttttattacgcaggatccagaggcaggggcagccccagctgacccctctgggctctaatttaactatctgttggggttcaccggaggcagatgtccctctttcaccacaagtctcaggggttctttaaggacttcataaaaacaaaggattaactgcagatgactaagcccacatgatggaaacagaatcaggtacagtaaataatgaacgtagacaggattagattcctacaaayaatacattgtgttctcctgctcttcattggcaatcatccccagtagggaatcagtggaactctttgagtggccaaggaaaacatctccatgtgcccaggatagcctgggtgggctcctggaggaggcaacccttgagcagaaagccgaagagcaatctggcctttgcaaatggagaaagagtggatgcatcagcagagaggagagtgggctgggacaagggtgagagaaggaagcaagcacctaggcccaaaatttaagaaggccctcactctcagggttgtacaagagcaggggtggcacttgtacagccctgagagtgaggacctccttaaattttgtaccctaggtttgttcttgcctctcctttgtcttggccctagagaaaagcctgggaaaaagcccagaacggtgaaacgacatggcgtaactaggaacgtgtgagtcatgcaagattgcccaagcctaatttagggacagagatgacttacagtgaggctagcagtcaagctgtggccggatcaccaaagaccctaggtgccaaataaaggaggttagtgcttgaactgaaagtgacagggagccaaggaagaattctgagcagggctgcaacatgatgagatttgcatatgagcaagcttcttctggcattggtgtggaggactgattggaggatgataggagaagctagaggctgggaggccagttcaggaccctactgaaaactctatgcccaagggagagacgacgacctgatatagggcagtgccagttaggagtaagaatgaagaactcactcaagacatgtgttgaaggcagagttgacagaacttggtgattgactgcagatgaggatcaaaggaaagacccaaagatagcatgaagtttcaaagatggtcatcaatttagaagccaagggggtttattagacaagataacaagcatgtgaaggcagtgatttcagcttccccaagtccaaggtaaacccttagttctcctgttttctgtaggataagctctctggaggctaggatgtatcttattcatttttgtatgatatctactctgtaagtatctttgaactgcattaagtggctttcacacctccgcatcctgctcattggctttcaagtggccttaggggtgttactattgtttgaatgtttgtctcctccaaaaatcatgttgaaatttaatccccgatgtggtagtgttgagaggtgaggcctgtaagaggtgactgggtcatgagggcaaagctatcataaatggactctgtgcagagtccccaccagcaagaaggccctcaccagatgcaactccttaaccttggacttctcagcttccataactgtaagaaataaattctttttctttataaattatctaggttcaggtattgtgttataagcaacagaaaacaaactaagacaggtatcaaagtccttttaaagatggctgtgtagctgggatcagaccaacacagcaatgtgttcaaactcccattctaaacacacagaacctggggctctgacttggccccacggtcttgagttgaagcctgaagtgtgactggatgtcaggcgtgggctgccctggggctttgggaagtagtgaaagggataaggtgaaggtcaagcagagtgggggatgtcaggaggctggggaggcttgggctgccaggtgaagtgggcctcatgaaagacaatttgagatcagaatgtcagacagagagcaggctagaaggcagctggcttctgagctgcagcctagaaaggctgattcagcagtgctaggaggaagtgggaggttttgtcgtcccagaagccatatctggagcaaggggaagtactaagaccacagggtagcatttggagccatacactgggactaacttcctctgacctaggcaacgacagactgcccctgtggtcaaccagagcccccagatccttttctgtgagctacaatgaagccaggcctcattcttcttgaacttgagaagtttagaaaatatctgctttgccttcactagcctccattttcataaaaataaagcgagtgaaaaaagcaagtctgagcgctttgaaacattaattaaagacaccacagtttccttatttaactgagggttgctacctcatctgggattattagcaaagcagagagcctttgttgtgctcgacaaagtgattaattcagactcgaggtgaattttggctttctcaacttcttttgatgtgctaagatcccccaatgaggacaacgtcatcaattacttaagccattaccttgagatcacaattatcggggaggcccagtctactaattggcagacagagagacagaaatggactacagggttgtggcttcaacccttaattgttctagggggagcgagagtcctttaaaatgttttgtggcaatgctcctgctaatctggggtgatcgagttgtttttccaccaggcaaaatgcagcctgggtgacctgcgtctctagaaccaagaaactgcctgtgattccactgacttggcgttctcatgggccaggacacagaactcagaactgagggatgagtgtgtcaatggaagagggatgaggttcataaaattggaaaggagagctttatttctcataaagggttgcggccttcgggtggccattccgacaggctaggaagatattttgatggaggggaaaagggaatgggaatttatgcagagcagggaggccaaatatacatattcaataagctatgggaggagtcatgaatatttatgaaaggagaaacatgtgcatgcgcaattgagcgtcatgcgccttcatgggtcccatgtagaaaaaatggcagccttagcataatctgagggtggagttttcgagcctctgacttcaaaaagtgaagcaaaggacaggaaaaccctcactgagcatcctccatacaatggccagaatcactccataatcggtggtctcgtatcaggcaaaagaaaggggcagcatcaggtggcaggttgatgtcagcggtggaggcttttaacatcagacgctttcagggcgttatggcgtcaacaccaatggaggctttgaaaaggccgctttctatttagcccttaggggagaaagcataatcatggctagtgagggaggggtagaaggagtgtgtctgactccccatcccatcatggccaagaactcagttttcaagtttactctggggaccccttggccaagagatggtccattcagtcagttgggggcttaggattttatttttagtttacaagttctagaagcaaacatcctactcaagaggcaaattctccagcccctggaagctgtctttgggcttccgtgggatgctacatctgggcttactgtcccctgacacataaggaattcaaggaccagatacaagaggctgctttttacattttaaaatatataatcatataatattctgtttaaatagatttatctttgttcatttaactaagccattactctttttttttctctccatcctataaaagagtttttgggggaaggttttatgctgcatggatatatgtcattggtttttctggtgaaaggtggaggaactttgtctggttaaatttagtcaaataaccaatacttaaacaaacaaaagccacccctgaagtgtttcataaatatcagtcacttcaagagttttatgatgtacgtcagttgctttgttctgttttcacaatagaaacacacgttgtgtgtgttttcggatggtggcactactgtttgctgtaccttcatcattcttctttaattctcactgggacagaagggcaagacactttcccagggtcagaatcctgggattggctggctggattttcttttcttcttaatttttttttttttttttaagagacagggtctctctctgtcacccaagctggagtgcagtggcttgatcatagcttactgcagcctctaattcctgggctcaagtgatcctcctgcctcagcctcccaagtaggtgggtctacaggcacacaccaccacacctggcaatttttaaaaattttttttgtagaggtggggtcttgctatgttgcccaggctggtctcgaactcttggcctcaagcaattctcctgccttggccccccaaaacactgggattatgggtgtgagctaccacgcctggccttgggctgaattttcttgggggtgggatgggcattttaaagcactcttgagaaagtagaacacactccattttaaggcagtttctttgcagtgcttcttcgtacacatcaacccyatgctcactctgccccatggcctccaggtgacccatctgttccaaggcagcagcctttccagtgccttcacctgctatggtgccacaacatggctctcgtttattgtgccagctttgacacctctgttctcagtttaatgatttttctggggatgggtccttcttggagggtcctgctttgtttttgtttttttccagattaactttgggggacataataagtggagaccatttatcgttttttaaggctcaacaaatatccaatagtcagacagaagagtgatcaaaatagaaagcatgtatttaaactgggactgacaggtgacaggggatgcctcwtagccacaatgatcataatgtaaatgcttaattaactgtttgtcagtagccattgaatgtctgtctggtccactaggctgtaagtgccacagagcaagggcatgtaggcatggtccctgcagcatcctggtacccggaactcagcactcccccagcaccatgcttggtatctgctctctggccatggttttgaactatcagctgagcccaagcaaccttgcagaccacattttgaytatgtcttcctcggaccatccttgagagtcaygtcttcttggcagtgtcccatagactgtgaatggtgagtgagatcactttagaaggtacacggactttaaaaawctttcattataaagcatttatttattttttaatttttaattttaattttttattttgagaaggagttttgctctcgttgcccaggctggagtgcaatggcgtgatcttggctcaccacaacctccccctcctgggttcaagtgactcacctgcctcagcctcctgagtagctgggattacaggcatgcgccagaattaaccatgcccggttaattttgtatttttaatagaggtggagtttctccatgttggtcaggctggtctcaaactcccaacctcaggtgatccgcctgcctctgcctcccaaagtgctgggattacaggcgtgagccaccgtgcccggcccaaagcattcattttttatcgttagttttttttttttttttttttgagacggagtctcactctgtcaccccaggctggctggagtgcagtggcatgatctctgttcactgcaagctccgcctcccgggttcacaccattcttctgccttagcctcccaagtagctgggactacaggcrcccaccaacacacctggctaattttttgtatttttagtagagacagggtttcactgtgttagccaggatggtctcaatcttcttacctcgtgatccgcccacctcagcctcctaaagtgctgggattacaggcataagccaccgtgcctggcctatcattagtttttaatttatgtaagtgatactgattttcacttatgatcacgacataaaatttccttttaaaatgaattcatttcaatttatctaaaagaaattgggaaataagtaaatgtacaggcaacttgcagatatggccaaaattataaaggggctatacaaataactgaatttagaagattaaggccttaatactcgttgagacttactgactcaactggctttcttgccctgaaaagttaggataaaaatggagaagttagttaactctctgaattacaataaccatcaactagatacctttttaaaagaattgtaatactttctttataaaacgttatctttggccaggcatggtggctsacacctgtaatcccagcactttgggaggccgaggtgggtggatcacttgaggttaggagttcgagaccagcctggccaacatggtaaaaccctacctctactaaaaatacaaaaattagctgagcacaatagtgcacgcctgtagtcctagctatccgggaggctgaggcatgaggcttgaacctgggaggtggaggttgcagtgaactgagattgtgccactgcactccagcctggacaacagaggaagactctgtctcaaaaacaacaacaacaaaactaaagaatatgtattcttggctgtttcagtggtagggctaccaaagcctggttcagtgctgcccaaggcagaggctgggtactgggtgagctctcggctggccttcccccaccccaccccctgcaactgtaccatgtactgttcagttctgtagaaacaggaagctcagggtaactcacagtccccaccccagacacttcttcttttcaggcacacttcaaaataaaatcaggatctacatacactataagttggygtggtagctgaatattggccccctaaaatgtcgatgtcctagcctctggaacttgtgaatgcaaccttagatggcagaactgattttgaagatgtgattaagttgaagatcatgaaaggggttaagtattctggattgtttgggtgggccctaaatgtaatcatgaggtccttataaaaaggacacaggagttgtcagagcgagagaaggcagtgtgaggactggaagcagaactggaaggttatgaccatgacccagggagacaagaaggggacaccccctgccatctccagaaggaaccagccctgtggacaccctgcctgtaaaccagtgaggttgattttggacttctggcctccagagctgtcagagaataaatttgtgttgttttaaatccctcagcttgtggctacttgttataacaaaaatagaaaattaatacagttgggaaatataagtttacctaaaaatattccttcgcagccgggggcggtggctcatgcctgtaatcccggcactttgggaggctgaggtgggcggatcacctgaggtcaggagttcgagaccagcctggttaatatggtgaaaccccgtctctactaaaaacacaaaaaatagctgggcgtggtggcacatgcctgtaatcccagctacttgggaggctgaggcaggagaattgcttgagcccgggaggcgaaggttgcagtgagctgagatcatgccattgtactccagcctgggcaacaagagtgaaactctgtctcaaaaaaaaaaaaaaaaattcttcacttctgacaggattctgcatttgatctattatgtaagacacttactatacatatagacagggtctcgctctgttgcccaggctggagtgcagtggtgcgatcatagctcactgtaaccttgaactccagggctcaagcagtcctcctgcctcagtctcccaagtagttagtactacaggcatgcaccaccacacctggctaatttttttttctttttagaattttttttttttttttttggatctcactttgttgcccaggctggtctgaactcctgacctcaagtgatccttgacctcctttgccttggcctcccaaagtgctaggattacaggagcgagccactgtgcctggcctgtttaaaataattctaatggcaaaggattcaattaacaagtctcaaaatggatgtaagttttgcacaggtattcacatggctgaagtaccaaacatggtatcatgaattaagtgcgtaacatctgacaacggtaacacatgctatttttgtattattgtgaactcatggattcaaaatatatttgatgtgttttggtccattgcaattattattttatggagcaaattgtccatgtatcagtcttgctggcctgaagtcaaggtgtcaggcaggctggttccttctgggggatccaggggaatattggtttcttgcctccttggttcacggttgctttactttaatctctgcttccaggcatcacgttgcccaaagtaaatgaggtggggatgtataatcctccaactgggagggacagtcatgtcttaacccattatgcaatctactgtgtctcaagtgtttctgacttgagaagttggtggattgtggttgcaatggtgatgtagagatgattgggagacaacagatttagtgggtaaattaaaatcagatttagattaactgtaaaatgcctaacagacattcaaagcatccatcaagttggaagttgggtaaggaggactggagctcagtggagaaaatggaactagagttaaagatgtggaattattgacttttagatggtattgaagtgatgggactcaacataaggaaaggagccagcaaagacagtgaggagcaatctttgaggcaggaggagtggtatcatggaaagagggaagagagtgcttcaggaaggaggaatgttcatctctatcaaaatcctactgaaggatcagtaaagaaataatgggattgataagatcaaagtcatcaatgatcttgacaagggcagccccaaggaagctgtgggtacagaagcttagttggagtggggggaggagagactaagggcacagaaggggaggaagccatctagacaatgctttcaaggaaacttactgggaaggaatgaagaaaaataaggcaatggccaaatccaaggagtttgccttttttcctttaagatggaagacactggaatatgtatgctgataggaatgatccagtagaaatggagaaatcaatgcaacaggaaggaacaataattgagaataatgagtaaggacaaggagcaaaactaacaagattggctttagataggtaaagaatccctctgtctctctctttctcatcacaatcatcagttcattagtatatgttattaatacacttttggtttctaagcagcctgcctttgttctcagcatattgtctacatgttctcatgttgtgctttatccacaaagtcttagcctaggggacagaaagggacagtaagtagggttagtgaataacggcacttgtctgaaatgtagctgacctggttttaactctgactcaattgcttagcagcaccttgggtacattatttacctctctaagcttttatttcctaatcagtaatataagaatggtatttatttctatccttatgtgattgttggagggcttgtacaagacagtatataaaaagtactaagcatagtgcctgagacacaggaaactaaaaactattgtaaattataataatagtaatgattgtgtaactcttgtatgtcaatatacatgtwtaatatatttttcttgtgcagtgacaaagttattgtcaggctaatgactgcartgactatgtctttgtggtacctacattattggtgaaagaactgaacaccagccagatatttatgtatttattgagtagtcttctattttttttccagaggggtaaagattataagcggttccttaggcaacaaattataatggctgtcattcactaaatcttgtatatagggtgggacagaattgaaaaaacaataggaaggtcttgtaactccaacatatctgttctcctgaggtttgcatgtgtacatcttatagcacattgatattcagaagtttcctattggaatgcaactatcagacaataaaaccactacattaaaaatgtacagaatgcagataaagaactacttagaggaagatttatagctttaaatgcgttcattgaaaacatgtgaactaaactaataacttaagaagttaaaagaaaacaacaaggaacaaagtctcaacccaaagaaaatagaaggaagtccataatcaaaatatgagcataaatcaatgaactagaaaacaacaaaaatcagaaatgatcaacaaagaaaaagttggtgctttcaaaagataaataaaatagataaacccatagcacgactaatcaagaacaacttttccaggcaagctaggagtagaaggaaatatcttcaacccaataaaggatatctatgaaaactctaaagcaaaacctcacacttaattttgaaacattagctgcattcctgcagaatcaagaacaagaaaaggatgcttactctttctgcttcctttttgtactagagattttagccaatgtaataagaaaagaaaatgagaagtcagacaaaaggattaaaaagaaagagaatggactgatattatttgcataaaacataattatcagcataggaaatcaaagaaattccacatgtaaaccaataaaactaattagaaagtccagaaggatcattgattacaacgctggcattaaaaaaaaaaaaaggtgctcctatacatgagcaacaccaaaacaaatgtacgtaaatagcaaaaagatactcttctctgcacaaaatcataaaatgttactgaaggacagagaaaataaaatcaacagagagatacaacacattcatatatgagacaaattgatgttgtaataatgttggtatgttctaaattaatgtatacatttaatgcaattccagaaaaatccaaatagcattttctcatcaaatcagactaattctaaaattaatatgaaaaagtaagttataaaaatgtattatatggtaaaaggaatttgagtaagaaaaaaagacaaaaaagagaataaaaagaagtaatatataaaaaagagaaaaaaacaaagagtgtgatttagagttataataattaaaatagtgaagcataagctagacaaatggatcagaatagatccaagcacctatactactgaggagcatgatagaagtgacattatgaatcagtgggaaaaagggagcagtgcagcaggcacaacatccctttgctaaccccttggagggatgtaatcagctgtgggacaggattattttaccagggtcccactgagataccgattctgttgagccacctctcattgtagaatctggctcaacacaccctctgatgattgatttggcttctcaagtacctggaaaggaggtactctaggaaggagatgtccgattcttattgcttggaaaaaaaatactcactattataaatttgtaaatgaacagtctcgtttgcaggttgtattttagggcatagcctagttactactgatacgtgagtgagtgtgcatcagatgatttccagccctgagggcaaactgagattgaggtcttaagggaatggagagggggctgaacatgaggatgaggatgccagggtggacactaggtgctaaaagggaaaccgagaagatctcacgtgtaaaatctgtattgcaccatttccccaccaacccttcaggaacatctgccttgaggcgtgatttaagcagtttcaatccttacagtttctcttgtgggtgtgggtgagaaatgggacaaggataaagggaatggaatttacagtcaactaacaaggctgtggttagttattagctaagtcaatgaaaactattcagatttatctgcttatcttcctcttcacacccagatatgtgcgtggagtcagcttgcagtacctatcaatgactgctcattttccaactaatttttaaatcagttagtggagcacaattctgcctgccacctagataaaccatactgtgggaatgagggggagggaggaagaagaaggaggaggaggaggaggaagaggaggaggaggaagaggaggaggaggaagaggaggaggaggaagaggaggaggaggaagaggaggaggaggaagaggaggaggaggaagaggaggaggaggaggaagaggaggaggaggaggaagaggaggaggaggaagaggaggaggaagggagggagggaaggaagaaggaagggaggaaggaaggaaggaaagaaggaaggaagggagggagggagggaggggggaaaggaagaaggaaggagggagggaggaaggaaggagggagggagggaaggaggaaggagggagggaggaaggaaggaaagagggagggaaggaagggaagaagggaagaaagttagttaataatgtcaaaaattgggaaatatttttgagaatgaagaagaaatgataggaaaatgtgttttctctctctagtaagaaaatagatgcagacatcaaaatacattgatgtagcttacaaattagaaaaaagttttatgagagcatttggtgcaaaggatataccaacggtaggactagctgggacaaactttatggaaagcaattagatattacataccagtgtttaaaaccagtgactcatggatctcaggttaagaaaatcttcatgcacaaagtgtgggaaaacctctgcgcagaaatgctaactgtagcagcataactcaaagtagctaaaatatagaaaacacgctaagtatttgacaataagaatggtttagtaaattataatatgtatataagagcactattaagcagccataaaaatgatatttataaaggattaataacatggagatgtttttccttatgttaaatgaaaaaagtagaaatctggataaatagaagtagagaaataagccaggcacagtggctcttgcctgtaatcatggcactttgggaggctgaggcaggcagatcgcttgagcccaggagtttgagaccagcctgggcaacatagtgagaccctgtttctaaaaaaaaaaaaaaaaaaaattagccacctgtggttgcgcacacctgtagtcccagctacttcggaggctgaggtgagaggatcacttgagcctgagaggtagaggctacggtgagctgaaatcacaccactgcactccagcttgggcaacagagtgagaatgctaaaaaaaagaaaaagaagaaaaagtagagacataggaaaaatatagagagagaatgtaatagcaaacatataaaaaatacacagtgaaaaaaaccaagagaatgacaatataaagagagtaggctttctccctgatagttctagcttttgtgcccaaatttctgtgaagcacttcaaaatgtgtcttggaaagccagcaaacctcacaccctgcttccatttcttaacaaaacgttttgaaaaggcaattatttaaggatctgtttctaataaagcttccgatgtggccatgatgtttaatggaattgctggcaaagcccatgagggcatgcgtgttgaaaccatagagtaaccatggcaaagggcctctcttctccaatgtgcaggacactgggttacctggcaccgctgggcttcacctgttcttggagcatcacaagtttttacccctggagaagcgctatttgccaagggaatctttcaccatttcaaatacatccactgaagtttttgaaagcagtgcaccaagtaggaattctttggtagtgacagtgaggatgtaatgaccgagcggaggggccggctggacccttctcctgcacaccacaggagaagccaattcctggaggtagataatttctgttttcttttgttccaaacctcagtcagtttgaccatctccttaatatgtgattcatcaaaataccaatttatcagaagtggcttctttggctaaacaatgggctaagcacccatgttgaatccatcaagagaaggttttaggctgggcacggtggttcacacactttggaatccccacactttggaaggccaaggcaggcggatcgcctgaggtcaggagttcaagaccagcctggccaacagggtgaaaccccgtctctactaaaatacaaaaattagcctggcgtggtgggcgcctgtaatcctggctactcaggaggctgaggcaggagaatcgcttgagcccaggaagaggaggttgcagtgaactgagattgtgccactgcactccagcctgggtgacagagtgagactctgcctcgaaaataaataataaataaataaataaataaataaataaataaagagaaagccttgaggaagataaaatacaggaaattttccagcctttacaaattgaacctgattttgagaatgatccagtggcccgatttattttgagaatggacagtaaattgtaccgctggcacagcagtatttgtgtcctgtagcgtttaatgacctcgttggttgtgaaaataaaaccgaaagatgctgtctaaagctatatatactttctgttgtcgttttccaacttaagtatccttgatgtaaacaatgacaggtgtccataaccataattgtgggaaacatttgcattaattcacatcaaaggaaacccattgtaaacatcagaacatggtgatcgtctgatcattgcgtattacctgctttacacagtagcatccctggcctcctgcacttttttaaatggcacaggacttaataacacaatttgacataaaaggattttttttacaatgacaatttttaaagttacagcaagatatttaaaaacaacttttcattgaccctgtaagactcactcataagtatccctagtgtaccacttaacctagggctgccatatcaaagtactacaaacttgagtggctggaaactccagaatttatttatttatttatttatttatttattcattttttgagacggggttttgctctgttgcccaggctggagtgtactggtacaaaagtagctcattgtagcctcaaactcctgagctcaagtgatcctcccatcccagccttccaagtagctgggactataggtgtgtgccaccacacctggctaatattttttttttttttttttttttgagacagggtcttgcttcatcatcccagctggagcgcagtggcacaatcttggctcactgcaacttccacctcctgggttcaagcgattctcgtgccttagcctcccgagtagttgggattacaagcctgcctggttaccttttgtatttttttttttagtagagatgaggttttgccatgttggccaggctgatctcaaactcctgacctcaagtgatctgcctgccttggctccccgaagtgctgggattacaggcacgagccaccacgaccaggctcacccggctaatttttttacactttgtagaggtgagggtcttgctgtgttgcccaggctggtctcaaactcctgggctcaaataattgtcctaccttggccttccaaagtgctaggtttataggcatgagccaccacacccagaccaccagaaatttattgtgtcacagttctgggccaggagcctgaaattgaggtgtctgcagggctatgttccctatgaaatctgtaggggagaatccttccttgcctcttcctagcttctagtggttggctgactatctttgacataccttggcttgcagtggcctgacaccaatctctgctttcatagtcactcggcactttcctgtgaatctctgtcttcacatggccatcttctcataaggacaccagtcatattggattgaggggcccctgtacttcagtatgactttatttatttatttttttgagacagagtctcactctgtcacccaggctggagtgcagtggtacaatcttggctcactgcaacctcctcctcccaggttcaagagattctcttatcttagcctcccgatttgctaggattacaggcatgcaacactacccctggctatttttttgcatttttagtagagatggggtttcaccatatgggctaggctggtcttgagctcctggcctcaagtgatctgcctgcctcagcctcccaaagtgctgggattacaggcatcagcagccgtgcctggcctatatgacttcatcttaactaattacatttgcagtgaccctatttccaagtcacattctgagattaggacttctggaggttaggacttcaacttatctttttggtggtgatacaattcaacccattacaactggggttcattgattttgggttaagaacgtgttgagacagtcagagggcagcaaggggaccctgagaccagagggtatgaaacaagagtgcagagaaggaagtggtagggagacaaatggaacccatgttgctattttgcccataaatttggtggcaatgatctctccctgcagatttgggtgcaggaacttgagttactgatggcaatatttggccagtttccagctgaagatgctcaagttccagatttgagtcgaggctacaaatgctcaagttccagatttgagtcgaggctgcaaagggaagtttgtggtggtgtccaggacactctgctgatgccatgtgtttgaaaatgtctgaattttgtgcatagacacactagcagtattttcataagtggagttacataattagggcatggacttgcataataattagcatgtgtaattaggcacagacttcttgtcctttagacaatcaagacatctaattacaaaattaagatgtaattatgtggtccaaggtctacatctttttttctacccattagagattacttttagaaaataattcaaaaaagctgatgaagaaatgaacatagacacgaatttgaggatgttaaagaaagtgttaagtgggctggtaagtttcctttggtctttcctctctgttgtaaggggaattatttaaaacattatggtccacttgaaagaataacttttaccaactgtgctgtcaaccttcggtactcacactaatgaagaggagtgttggtatgactaatccttggcgttcacgtgtggctcttgagtgtggtttgtaatcacacttgaacatggacctaaatgtgacgtactgggaattcattcaaacctattaatggagccatacggtggaaatcttaggataacttgggatagaggacatcctgccttcccgttctgccctggttctcccttgtgaccactttaaaaatcgactcatttggccaggtgtggtggcttatgcctttaatcccagcactttgggaggccaaggcaggaggaycgcttgaggccaggagttaagaccaacctggacaatatagggagaccctgtctctacaaagaatctgaaatactagttgggagtggtggcacatacctgtagtcccagctacttgggaagctgaggcaggagaatcacttgagcccaggagttttaggctgcagtgagcctccactgcactccagcctgggtgacagaaataaataaagaaataaatagcacattgctcagaataatgcaaaccagcacttaagctgtgtttcctttccctgaatatttgagtatttttattttaagtactccttattgactgcaggtgggaaagatcaaagagtatagcaaatactctgtcctttgaaaaagagtgattcttatagcagtaatagtttgagtttcaatacacacagaaagctagattgtactgatagtctccatgtttttccttgcccttaaattgtgatttggctgatctctgcgtgatgctwaacaaccagtttgactcattaattttgctgaactaactgaacttttgacctaattggctgctggttagggatcagagccatatgtgcaggtttttctaagccagttctgactttagctgtgttatccctctgttcctataaactgttgaaataccatagtaattccaatgttttgacagccacactgcacttctcagactgccgctttctcctgggaagtggcacagaaatctgtcggaccacgcttcctgatttttggttaagaaaatatgcttcccatatggttgcgggccgagaaaacaaagacttaaagaggttgtaagcatttggtgataggtcttctcctcatggcgccttccctccgttcctatttttactattctctgtaaggccagggaatgtgatgagggacaaattatgtgtgtggcagggaggggttagtcttgaccatgaaaatacacacatttgcacagggagcttttgccattgttagtttttttaccttgccttctgagcaattgctcgtgatagatttagaggcaaaggaaaggaattggagagagtggcatttttaaaacaatctattaagaggaattctaggtcagagaggggcagttggactacatcatctgtaaggcatctccagctcagaggtttcaggattcgttgatctccagcaggtcactcaacaggaggttgactggactcctattctactcactcaactctaggcctccaattttttggttcttagatgtggtgactggaaacctattcttttgcctttacttccagagagctcagtaattctagttcctaatagagcctaaagcatgagtgcaacttcatttctcagcttttgaaatctgcttttccctccaggtactccacatcagcattctcaagactggagaagttaggcctcagacatcccaagccttctcctttcattggaaacttgacatttttccrccaggtaagggctgtcttccattggcttccatcataaaatatgctgagggccaggcacagtggctcatggctgtaatcccagcactttgggaggccgaagcgtgtggatcacctgaggtcaggagttcgagaccagcctgaccaacatggtgaaaccccgtctctactaaatacaaaaaattagctgggcatggtggctcatgcctgtaatcccagctacttgggaggctgaggcaggagaatcacttgaacccaggaggtggaggttgcactgagccgagattgcaccattgcactttagcctgggcaacaagagcaaaaatctgtctcaaaaaataaaataaaatgaaataaaataaagtaaaatatgctgagcccaggacaggctttctgcatgaaacattggtcttgtccaggtccccacaccttgagcagtaaaggtgttctgtgatgccatgagccctcctctacttatatgaattgttatgtgatggcaagaatccatctcttatcactatcaatatgtattgagtcctgtcatccattcactcacccatttcccccaaaccccatatattgtatgtctaaatacgtcagaccctagagtgtagaagaagaggttacttgtgccctcaagtgcactgtcaaatgatggcatgcaacaccagatgagatacaccctagcactaaatagggtggtatagacggtagctgtaatcttctgtcagaggagagggtgatctgtcagggctaaaatcatcctaaggaacttcctgaagaaggaggtccttcagggcctgtggacatagagacgagggtacacacaccaggtgggtggcactatttatgtgagtgtaccaacgtgagaatgacagcacaggttgaccagcagcctggactgactagaggccaaatgctaaggtgcactgggcaatgcagttgggtgagagaaaggggcactagatgcttacagggtaggaaggcacgtgaagaactatttgtgtgttaacatttttgaggacagggacattgaaatggacaacactctgcaagggagaagaacataggttagagctgtagaacccaactgttgctgaagtccaggggtgaagccacgatggctcggtctggtcggtgatgagagtgaatagagatggataattgggagcaaaatgaagaactcttgtgacaaattagtgtagagaattcaaggcaaagtgagtcaaacataagcctaagctttgagccaggggaacagggagaatggctatgggttgacagaaataaaacgttgggtgggggagtggttcagggagaagacaagttttattttaagtatgttgcttgggatttgccagagtgacatgccagtggaaatggccaacagacatttgtagatataggtcaggactttatggtctacggttattttttctcacattgggttttctcagaagccagatggcttattctgctaagtcacggggacactgactccagacccaacgccaggagccggaacaccctgcatgggaagaaccaccaagccaaacaaaggcaggaagactaaatttgggacaatcctgataatatcccttcaacatctctagaatttcccccatccctacctccggaaaggctggcccttggcactagatagaaaagaaagctgctctttctgtccttttctgcccccaccttctcaattatttcttttccattcctttctgtgtccatcaccttttccatgatttgtcattgttgtttctgtcttcctagcatttttaaacaccttctcctctcatctctctctctggggtgggcggttcacaacttttaagctcacaaacaacagtctcaatgaggcttcctgttagccccttgaaacaagtgtgaagaaattttaaagtgtcaagatagaacaacaaaccagatcggaaagctaaagaaaatgcatttcacacatttctggggggaaatgatcagttgtattccgtggaataattaatttggtattaacattctgaggaaaacggcgtagctgtcgacatgaggagaacgctgtgctcccgcctctggagagcctccacatatgctcctttgcagcccgccatcctcacagctacaagccctgccaagttctttctagaacatagtaatttcgctgactatttttatattcatatatactttccttgatatatggcaagcttacgctgcagaattcagtagatttcatgagaaaggcatgtgtttccatgcaggacatccacactcctaacccccaactttccaccttcattccaccccttatgtatccaccccatactccattctcacaacacaaatctaccatttgccaccccccacacccaccccaactcatgagtattttcaggtctagtccattcccaccacacaatggatctagcattttccacccctccgtcaacccagctacacttctttcccattataaaatgtgtctagccaggcacagtggctcatacctgtaatcccagcactttgggaggccaaggcaggcagatgacctgaggtcaggagttccagaccagcctggccaacatggtgaaatcctgtctttattaaaaatacaaaaattagctgggtgtggtggcacatgcctgtaatcccagctactcaggaggctgagacaggagaatcgcttgaatccgggaggtggaggttgcaacgagctgagatcacaccactgcactccagcctgggtggcagagcaaaactctgtctcgaaaaaacaaacaaaacaacaacaacaacaaagtgtctagcattttgtcttatatatcttaaacatgttgaatttaattaaagtttaactcgaatggatcatgataattcagaatttgtgataattttgatagactcagtagaagttacatatagtggcagtaaaaagggctatatgataatgctaaatcaaatttcagagggcaatgttatagttgagaaagcaaactttttgaatattttagcagcaagtatacataagtagtttaagaactggtgatctctcctgtccaagacttttacatggcaattttttttaaagccttttgtttattccaatgtttcaaagtacctgaaagcaatataacttccattcttttttattgtttctgtaattgtattcttgctgttccaaattgtttactgaataagtttgaataattggaattttgcttaatcttattcttactatagtgctgtgtttccttcagggtttttgggaaagccaaatggagctcagaaagctgtatggacctctgtgtgggtaagaaggaaactcaacgtttctattatgtacgatattttctattatgtacgatattttgattttcacgtgttgaactgatatagaagaaatgccaagattaggaatgttgtatgtgtttctatttttcaaagggcccacaaagagggagtcctgcagtacagacaaggcttctagagaagaccctggggttgcccacggggggactctgctggcctgaaagagtaccactttccagcctttgcagccttgctgggctgggcacagcatcatctcccgttgctgtgctgaggggtgttgccacgggatgtggtggcctctttgcctcagagcacaaactgtccaacttgccttgacagtgcacagcaggtcttaccccatgagcatatctgaaccttactcagactcgggtccttcagcccatggggaaagtgtgctgccagcaacatgaccgtgtaatttatcacccaatccagttcccttttgaaagtgaaaggaagtgctattaataattaccccaggataaccttatcacctaagactatcccggatatgctggggcatatggtcaccctagttcttggccgtgtaaagtaatatagcccttctctttattttctgaatttctcctttgtatgctcctttgtttctaaaattccagattctggtgagcaaacccacgttcagaccacttactctattcaagatttaacaggcttgaattgtattgattctcaacatgtgtctttccacactgaagtcctaatcattttagttggttttcacgcagcttctcttcagccactgagcgatttttttgcagcttttcgtagacctctgggtcagcgatcacttttgtaggtgcattaaagttctcctgtgttgccgacgtacattccaatgggctccagtgatttgggggtcctatctccatagtattcatgatgtctgttctcctgatacccatttttgaaagggattggcttgtcctctttatggaaatggcccctcctaggaagcccacagttttggtcaagttcttctacctactttttggtttgctacgtggtcctgaaaaagtaataaattaagatgttaagatgctctctgtattagtcattgctgcataatggactaccccaaaactcagtgacataagcaacaatttatgatttatcatgtgtctaagggtcagctggagttggctggcctaagctgcacttggctggatggctccgctggacttctgggtgtatctgctggggaggacctcatgtggggcaccaaggctctgcatgtctctcatcctctttggaagtgtaagctcggctggcaggttctcatggtaagggcaaagactcaagagagcaagcctgatggtgcaagaacattatacatttctgctgaatcatttcagcttataccctattggttaaaccaagtcacacggctaaacccaagatgtgggcaggagggcactgtggccactttgaggccaaagcaagacacctggcccagcctgacattgatggagcagggaggtgtactcctcggatggacgagcggggaggcaaggcgtgtctttaaataacaagcaaccctgcttcactccctaagatctctttcaacttggccttcacttactttttcatttttgctttttggtgcatagcttcttgctttaagcgtgataggtgctcgataaaggctcaagaaattgaactgtctacatttctcttaccgttgtgtggttctattgctttttgtttttgttttttgttgttgttgttgtttgtttgttttgcaatagagtcttgctctgtcgcccaggctggagtgcagtggcatgatctcagctcactgcaacctctgcctcctgagctcaagcgatgctcctgcctcagcctcctgggcagctgggattacaggcgcccgccaccatgcctggctaatttttgtattcttagtagagacgggattttgccatgttagccaggctagtctcaaactcctgacctcaagtgatccacccatcttggcctcccaaagtgctgggattacaagtatgagccactgcacccagtctattgctttttttttttttttttttgagacggagtctcgctctgtcgcccaggctggagtgcagtggcgcgatctcggctcaccagtctattgctttttaaaggttctcattccagctctttctttcaaacagtctcattctgcagctgagttggcaatgacttggagactgtctcatatgcctctgagacacagcactgactcagaatgacagtgccttcaccagaatcagaaaaagtcctgactgagtttgaattctaggaaccacttttcttgagtgtttcttgtacagatatccaaagtagagcctttgggtatttaaaaataatttgtaaatgccaaattaagagtttaaagggcactgtatgaactagttgtgtgtgtgtragagagagagagagagagagaaggagagagagagagagaatgacagagaaaaagagagagagagaaaaggagagagaaagagacagagaaagagatagaaagagatagagaagatagaagagggggagagagagagagagaggagagagagaggtggagcgaattggtttccttgacaacaggatatccaatcaactttttcctccaactttaactgagttaacacaatttatccttttcatttcaagaaaacctaaatcatagagaatgatttcaaatgaggttatagagatcaagattgcagtatcatctccattctttgttcccacttctagtgaaaaggaaaaaagaaaggtgatggcataatttcttcctataaagctatcaacttttctcctttggaaaaaaaaagatgagccataaaacactgacttctttttaaatgtgtctactcccagatttagaggcaatatggtggcggtgtaaaaatgaaagggttgaaccaatctaaatcgaatgtcttttctaactctaaatgttattttcttactgcttaaattttagcaacatagtttcactcattgggaatggactatgctcaatgaacagcaaagacccttcttgcagagaacaatttaatttaaattacattagtttttattttattttttattttacttttattactaggaaatataatcaatcccagcttggtcttcttaaaaattgaaataatagattgattcattatttgacaagtgaaatgccacactctacactgttgatgccgtgtagagatgtattgggcctttagatgacagcttggcactgaatgttgggagaaaaatggacagggcaaatctcctcactgctcgagactggaaagccaactatgatggcaatgtatatttattatctggttgtcaccctagcaattcaagagtttgaggctcaaaactggaaattgactccttactcaattcccctcccactccctaccatggggacaatagggctggagaaggtttccatcaagatgggcagacaacatcaatgtttatcattaccaccaacactgccaccaccaccaccatcaccaccaccatcatcgagaacaaaatatcttcaccaagtgtctacttatgtagcctgctttgccaggttctgtgtaaataaaactacacacggtgtctctgccttctttgaacttgaatgtaaagcaggaggactggcgtggatacctatacagctattagtcgtggtggtacgtgataaaaaactctcctgaattgcacagcaacctggccatgtaacacaaagaaggcaaggctttattgctttagataaccttcatcaattaatgattacttgttatctccttcaggctgagaatgagccccaagttggatttatattccttcccaaactctgtaagaacagaatcaacattatcgtcatacattggtgattgaatatggtttatattcaatatataccaatattgaatataaatatatattgatatatattcaatatatcctgtttggatagagattatatcccctccaatttgtagctggactttgtaacccagtagatgataaacctttattaattacttatagttaagtaagaataaatatttacacagtgccctaagttcaggtcattagcaactcctaaaggccgccattcaaagctccttttccctttatctcattttgtgtgtgtgtgtgtgtgtgtgtgtgtgtgtgtgtgtgtgtgtgttttgttttgttttgccttttgaggcagagtcttgctctgtcatgcaggctggagtgcagtggcacgatctcagctcatggcaacctccacctccgaggttcaagtgattctctggtgcctcagccaaccaagttgctgggaatacaggcatgtgccatcacgcccagcaaatttttgtatttttggtaaagacggggcttcaacatgtcggccaggctggtctcaactcctgacctcaagtgatccaactccctcggcctgccaaaatgtgggaattacaggcgtgagtcaccatatccagcctatctcattgtcttttaaatgcttgctctatagttctgcttttacttagccttatccccgtttcttcttcccccaacatcactttagttttgatcttggctccctcttgttgaacttgacttttacacttcctggcatccatcagctatgccgctccattttggtaagtggcacctgcatccctggatcccttcatgatgccagccttgttgcataacctcatatactcccatcagagcatcaagttgtaggtaggtaagcatgaactttgtacataattcataaagtacaaatgagtataagaaaaaagtacacttgctcccaccctggggcccatctgctccttcacagaggcaacctctcttaaaaatttctttatagtcaaatggatcatatatgatacatgctgttctttaccttgctttgttcattaatggtatttgggaaattgtcccattttgcttcattcattcttgttaaattaggtagtgtttttaaggatttccttgtatgaatgtatcctaatttttaaaacaagttctcaattgataaacatctcttacttttacaaacaccatcgcagtgaagattttcatatacacatcattgatgtctggggtaagtatgcaagataaattcctagaaatggaattattaggtcaaagatggtctatgtttttaatttcgataaatatgactaaatttctctttctagggtttatgtcagtttagattcccataaatatgcatatgtccctcccatacttgtcattaaaatgtgtggtcacaattttaaatctttaccatttgatggtatattgctgcagtttcgatgtgcatttctctaattatgagcaagtttgagcatcttttcatatgtttaaaatgcaatgtattttgttttctgagggatcctttgccacttctctgttgggttattgatcttttcccactttatttgtagaagctctttgcatattaaagaaagtagccttttatatgccttaaatagtttctcctctttatcattgtctttgactttgcttatcatatatttcttccaatcagaaaacatttgtttttgtgttgttgactttaattgattttaacagtgtctacattttgcatcttactcagaaaggttttctccaccaaggatattttttcataaactttcatttttctagtttctttaaattttatttttaaaatatagaatgtttgatatatcaggaatttatttggaagatggagttagggacacacccttttycccccccyccaggagggtagagttccatctggaaattcatccttttccaaatgatttgaaatgtcacttttatcatttattaattcctaggtgtatttctgatttctctattctgttgtactgcttaatcacaagccagggctgcactgaatatcctcgtttggatgtcacgtttgtagcttcttgtacctagctgcagtagggtgttctaagaacatctttgtaagtatcaaagcctgaagcaatctatctcccagggaaccttaggtcccatactgaaaaaaaaaatcaatttagcaaataaataagcctttggtataaagggcctgacacttagcttcaaagttcacaccacaggagggggaggtgtctcatatgcctccaagttggaggtttttagcaccatttttaaaatttaattagctagcatgcatgaactaatagcaccttgtcaccaggcagtgaggaagttgagaactttgggatacataaggaaaagcatgtggcatcagcaatcaaaataacaaggtcgtttcaacactttttaaagctcagcttccatggtgccatccattaggagagtctgtgttctggaagtgactaaggtgtgaacacttttygtgtaattgctcttaaccatcatgtttatgtactatttagatggggttgaagaacagcatagagatggtttactttaatactggcagatggctatgtgagacttcctggcctaccatcatggatcaagaacaacgggaattgaagggctctgaaagactcacctgttggacatgtttgttctttgacttagaagatatgagacatctgaatacactgggcttgaacatgtggctgaggatagggtagggtggaaactattgctgatttgtccaagaaaagacaagtacttagacttaaattgggcagctgacacctggagatggcacttgtttttaaactggactgagctcagtagaatcatagatgttgaagaaaggtggaaattaagccaccgttgtggaagagcttcccagacactgatgctaaggagtcaaactttaggtttttgctgctgataaaagtgcaagcctcagtatgaggctcatttactaaatgtttgacccaaaaatgtggctcaattctaagaggaattgatgaaaatgaaaatatacatagtatattgagaaaacacaatacccttgaaacagtggaattaagcacagaagtcctgaattattctaacatctctggccatgaggccaaactgtgggcaatatttgggtcccctagcttggtgaaagctggctttcatgaaagcgttgaaagcaaagctgtgcattgccgttcccaataatgtgaatctgaaagcaaaattcatgtgagaccatcatgatggtctgtaggtcataattattgagcatcattcagtgagtgaaatatcaatattctcactggtcaaaatagcttaatcatgaacactaagcctgtaagagcaccttttttaaatgattggaattcactaaactgcattattgcattttaggggggccattattctctaaaagtgaatgccctgacatagtgtgctgatgttttaggaggcctttgagaataggaagaaagttgtccacaggacaactatcaccaagccaagcacactgcccagtaggtggaattatcaaaggaacaattgtccacagataaataagtggcttagaccaaagagacagaggaatttgatttgagtcccacttttcttgaatgaaccattaatagactcttcacccttacctgccaccagcatgatctcgttataccaaatagtgtattgctacaaagcttccatgctttcttatgatttaagaccaccttctttcccagtcttgatccaaagacccttctgaagtttacctaattttctggacttctaacttcttctttcagcccatttattttataccagttcatttccccccatcctctttctataacagcatatgggtgatggttgctgcatattttaatgactactgctatctaagtctttgtgacccaccctcataaagatcaagaacctgtattaattccctcttctttgggtagaarcatccaacagggcatgatagcttacagtagaaatctgcagttaaaatcccagcttcaactttctttctctctactgcttgttaccttaatggatttaggccaatcacttcccctctccagctttagttctcttagatgtaaaatgtgggatttggactaggtcggtgattttgacactgtttaatcatgaacctcagtaaataatatattaaccacattgttatctaatacacacacatacatttgaaataaaagttttacagaagaacaccttattcacagtataagaaccactttgatctattctattgtattgtattctatctgtaaaaaataaaacatttacaagttggtcacagcccattaaattgatttcatgaccactagtgagtcaaaatcagcaatttgagaagcaaagggccagatgatatctgaagtcctttccagttgtaaactggatgactacaarccaatgagacagcccctatcagtgtgcatcagaaaattgttagaggccattgtgtttgcctctttgtggtttaagattctgagaaacctctgtcaaagtcagtaaaagcccaccgttcacagctgaaaccgaactccagtggaagcacttctcctgcagagaccagctcccgcacctgactgtgggcccaggctgggcacctcccacccagtagcaccttcttgttytttaaaatcacaagttcaactattattgaaattatttccaagccttaactcggaatcatgctaagaagctaacacaaatatattaattgaccatttaagacatctctctgtaagatttttgcattgggtgtaaatatctaagtaattcatgtggatatcttctcccaggtaggtgtggccagctgattacttattcccagggagytggagcagcaggaaggaatggcctggaaactggaaataatcccatttgccggggtaagctagctgtggaaaactgaccaggctgtgggtaccgagagagcagcttcctgctaaacttcctgctgtgggtgaagggcagcgtttaaagagtaagatggtgctccccattccagcaaacactggccacagtggacagtccaggagagagctgtgcaccaggaaggtgtcagctggacagtagtcargcgtccagtaaagcagcgatgaggaggctgtcagtggacaccagggccccactagtgggtggttcaggaacctgagaagcccccggccctgagaaaggagtctaggtagtacagcagggtctcagcggtgagggctctgaggatgaaccaggaattgacattcagttctaagattcacagcatcatgtgaggcccaggaccagaagccagacctaatctccgatatcagtcagggtggacaggtccatcatggttggaacagatccatgctggagaggcaccgagtctcaygatgtgtggctggaggttgttcctgcttctggggccagggctgggcctgcagatgagggacagagcacctggctagaaaggagagaggactgcagcggctggagcgtcagccacagatttttaattttgctttccttgatattcacatccaaaatctaccatggagaactgtatatcacgttcaaggtggaagggaactaactcattcctcattagtaactatcaaatatggcatcagtaccttctttatcctgtaagtgacagctctgcacagatgtgttcccaatcgatagaatgtctcaattaaagttgcataaaagctctattttgagctaatatcttcaaataataaattccacatttaattgaagcgtacctgcaacaaatccaagttgttcaacccaaaatgcataatagagtatgtaaaacagtcatgaatcactgtgacatttgtcaaggcattctcccatctggaagcaggtccagaaagcacatggctgtatgcatatatcttttgtcaagaactttgcacagacagtctcaaaaagtgcacacatttacccaattcttagggctcttcactctgattgagaatgcaaatagcattcctattctatctaaaaagaagaaagacaagccatctttgatttcaaaatttaaaagaaattattactaaatttgaagaagcaatgagttcccaattcacttagagcttaaagttcctctttcatcactattttgtgagcagaggaactttttccaaacaagttcttagaaatccttgcttgattaaaaaccagttctaaatcttgttactcacatagggcaaaaggtaaaggaatctaaatgtctaaaaccaaattaactccagatactagtgtgaactttcaagcaaaaaaagtcacacaccaccgcatacacstttgaaattctactaaattttgaatgtttgacgttagcctttaaactggaacatattcttctttcttccttaggatctttaaatcttttaaagtttgggttgtttactatgcattctaattactcctgatcactcttatgtgtaacatttctatagctatgcacacaaagtaattccttagcaaggccccaccaagttttatgatgcctgcttgcctagggcagataatataaacttaactacgaaaataagttctttgattattcttcgtatctcaagaccgtgctcctaacaacctctcctccatctcaccctcaagctgcaagaattttgcaacccactctatgaagtttttccaccctgagtaaggctgtcagtttattggcctatttataaaggtctgactctctgacatgttctccaggctccccacattaaccactaaggaggcactctttgcagatgaatttttttttttttttttttttttttggcctcggcttaaagaggaacctattaacctttgcccggaatctatgsctggtgaatggcttgtcatagcatgttagtttgatgaggcaattgtggtcttttttgttaaaacaccccccagcacctcttgatactacttggcctactggagatgtgggcatccaggattgaatcaaaactactgcacttcacaacagagctactgcaggaaggaaatccaggtactccctggcttgtgccacctccatcttttccgtggctaatgtaatgcctagtgcatattcaccacaaagaggcaactgttgaatggctcttccatttgcctttgaagattgcttgtaactcttcaagttcacttcttcatctcactgccagaccacagcttgagactgatgattgacatkgccactaggttcttcccaaagactccagcctaaagattgttagctgcttcccccaaaggcttagccttctctgctagagttttggttctttggagcatcccatgagcaagaagcctcagctctttgtcctcctctgtgtaggagcccacaaggatgctttatctccaatctggaatggacacttagcatcctkagttctgccctgctcaaaatccatacctgttcatgagtaccagggcttcagggcccgagaacccacagctaacacccataggagaaaggtttcatatgagtaggtgggatgggttttcatgcctctacaacctggccagcaggaggaacactgtgacccatggtttcagaattgatggtctcccacttctcggttagatctaggtattgagaataacctgaaggacatttggctggaggacattatttttattgtgttaaaatatgcatcacacaaaatgtactctcctatttttcattgtatagatcagttgcattaagtaccttcacattgtcgtgcagctatcatcatcgttcacatccagaatttttttcatcttgcaaagctgaaactttgtcctcattaaacattaactctcccttccctcctcccccaggccctgacaaccaccattttaccttctgtctctacaaatttgactactctaagtacctcaataaagtggaatcatatggtatttttccttttgtaactggtttatttcacttaatataatatcctcaaggttaatccatgttgtagcacatgggagaactactgcctttttaaggctgagtaatattccattgtaagcctattctgccttttgtttattcgtttgtttgtagatggcggagtgtgttacttccagcattgagctamtgtgaataatgttacttgaatatggatgtggaaatacctctttgagaccctgcttttagttcttttgggtatatatgcagaggtggaattgccagatcacagagtaaatctatttttagctctttgaagaccgtcatactgttttccatagtgaccataccatttcacctttggaggacatcttatagcaatgctttgttgtccccttttcaccacgattatgtggccattacttcttgttttcaaaccttgagagtgagctcaggttaaatttacacttccctttgtgccctggatcccaactggtcaaggtgaaccacacatttctaattggaatgtatgaccccagtgactttgcctgtaacttccttttggctaggccagtaagcgcatttttaaccaaaccgaccccattatcaacaaatgcttgcactgcacgataaattcagtttgctttaataaattcccagtagtcctcacccagagctccttctcctcttatctcactccttgctgccaaaccctttacaatttatgtgtctgcctttcggttctgccttcagccccctccaagtttcctctttcccaccagctcactgtggcctttgtgtctcacataaattttgtcttctgtgtctgaaactcttactgacttctgcttccttgytccctgggtctacactgttccttctcttcctggaactgacccttcgatctctgggcttcctaccttgagtaatttgtcaaaatcctgttcttgcaattggtggcttctcaatttttttcctctgggtttttttcccacagtctttccactatatcacagggcatacactcctgcttcatgactgttcatgacatattgaattcccctcttgtaccccacagtctctgcactgagtgtgtgctcattgggaaaggttagctcacattatacctatccaaaaaaggagaggtggcaggtggcctgtggagaagagtgtatccaggcacatatgcatgggagaaagttcagaggttttggctgagatagaaagaagaagagtagaggccaaatgtgtgctaggaaaatgtgatgtttggggcacaagtagagaggacaaccttggcagtggcagaygagagagaacctcaggactggtgctaaggaggtgggttatttaaagaaagttgtgcaggtatagagtggagaaggggtgcagggggaggatggaattgagttaaaaaaaaaaactagcaaaaaacattctgatagcacaggtgagagagataagagtgatttagattatcagaaatggaaggaaaagaaggagaattttatagagaaagtgtcctgtagtggccgggtgtggtgactcgtgcctgtaattctagcacattgggaggccgaggtggggagattgcttgagcccaggagtttgagacagcctgggcaatatagtgaaaccacatctctacaaaaaataccaaaattagctgggtgtggtggcatgtgcgcctgttgtcccaagtactttggaggctgagataggaggatcgcttgagccaggaaggcagaggctgcagtgagctgagatcatgtcactgtaatcctgtcgaaaaaaaaggaaaaaaaaaaaagaaaagaaaatgtcctaaaaatgcagcaagtcattgattgtaacaagtaagagatgagtcaacattaatcactgaggctgacttcaaatgctggagacaacatggtgattccaccataattaagaggttgaacagggcaaagacaaaatagttttatctttttcttaatccgttggagcttgtcctcatcctcatgtgttcaagctgttataacaaagtgccatagactgggtggcttatgaataacagaaatttatttctcatagttgtggggactgggaagtccaagatcaaggaaccaacagattcattgtctggtgagggctcactttctggttcatagatggtgccttctcactgcaccctcccgtggtggaagaggtgaaagagctccctagggcctcctttataagagcactaatcctgttcaagagggctctgccctcatgacccatttgtcccccaaagaccccaccttctaatactgtcatctgggggtttaagatttcaacatatgaatytgttggggggatggatacaaacattcagaccatggcagagctgctaaggagacattgggtgcaaggtgacttaggaatgaagcactcagaggatcaggaagctgcattaggaaggagagaggaatgggagctccagggtaggcctgraatccggaatctccacctcccaccctccaacaatcgaatggggtgtttcccgcagtgtgtccttgagaccatcgtttccactgacagtaataattgttacatggggaatagcaaaaggaacacaggtctcttcagtgtagaaagactccgaacctttcatgcagcaatgtccttcgacaatctccaagtgagaaatttaggatgcagtctcttttttttttttttttttttttgagacagagtctcgttttgtcgcccaggctggagtgctgtggcgcgatctccgctcactgcaagctccgccttccgggttcacaccattctcctgcctcagcctcccgagtagctgggactacaggcgcccgccactgcgcccggctaattttttgtatttttaggagagacggggtttcaccttgttagccaggatggtctcgatctcctgacctcgtgatccacccgcctcggcctcccaaagtgctgggattacaggcgtgagccaccgcgcccggccaggatgcagtctttatttgaccacagaacatttttccccccagagtatttcttgggactaggatatggagaacaggctttgagagaaaacactgatctaataaataccagcattttactcctaaagaattccccataaaagacaaccattaatagaaatagtttacttcaccattgtgaattatcaacattacaaccagtaattactaattacctccattttgagttgatgttttgggggatgtttttatcctgcagtgctatggagaggctgggaacgcactgctgcctgtgttgcttgtttatttatttccttttattcccagtgttctctcattccccttcccatccccaatagtcaaccattccaattgtgtttaatgtgtttttttttcacatgttcttgcaaaytgtgcattatcatttcgtggatattatccttagtttatgccaatagtactgccgtagatctcattctattccttagttttttcatttagcactgtgctttcaaggtccagcacagagttcccattgagtctgctgcttcccatggctgcctgacatgccacggatgcctgtacctacttcacctgtccactgtcccaggaggagatacccagtggccctcagcaagcaaccctgcagtgggcatccttttatgggacctctacggacctgtgggagaactctatgggctatccatcttgccctatgattataatatatatatatttatttatttatatatatatatttgttccctaaggccacttacatattaattgctaataatctgaaagtgttttccagcactcagtgtggatcatgtccctccaatatagtatctcccatggccatcccaataacatccctgagagtttggccgggctagttgcattatcctcaatcatacagaaacatgagtgactagaatgaaaagggcgtgtggctagtaagaggtgtgagcagagttgcacaggttctttttattaatccaaagctctttccattccactgcctcttcttgctgtttcttcaacattccaaacagtcctgccttaggacgtttgccataacaatacgtaacataattatttgttggttgacctgctttcctggtagaatgcaaacttcacgagggtagggacttgctctcttgtttgtgctgctatttccagtgcctagaatggtgactgacacataatagatgctcagtaaatatctgttgcgtgaacagaagaatcatctctaagtacatgtctttcatgtcagatttgtctccaaggaaacttcaaacaggaaggtcttgctatttggctaatttgggtaatggtactattttactggagacaaataaaaggaattagggggagagtctcatattaaaatagagggttggataaggggagtttatamtctttccccatcagtggcttttatgctctatcaattcagtagttagcccatcaaagtaaaaaattgaattacactgtgtaaggccaccttgggatccaaaagataaaagagaagataagggacatgttytcctgatacactagctgggctccactcacccaagtcattaattggagtcttattgggctactgcctcatatcctactcccgaagagytgatacctcccataacctcattcttagggtcagctggccgtaccagaaagagcactggattaggagccagatctgggttctggtcttagctcagctatccctactgatgggactagaatgaatgagtcatttatcattttcttccctttaaaaaatacttgaggccaggctcagtggctcaccgctgtaatcccagcactttgggaggccgaggcgggtggatcatgaggtcaggmgttcgagaccagcctgaccaacatggcgaaaccccgtctgtactaaaaaaatacaaaaattagcctagtatggtgccgcgcacctgtaatcccagctactcaggaggctgaggcaggagaatagcttgaacctgggaggcggaggttgcagtgagctgagatcatgccactgcactccagcctgggcgacagagtgagactctgtctcagaaacaaaacaaacaacaacaacaacaacaaaacaaaacaaacaaaaaaacttgagcacctacctatctcacaggtctgacatgagactcaaaggagctctcagagccctcccagggcagactgtccaagtatcagggattccaacygggattccactgctccttggtgttcttgtagccagcctgcatcttggggagtctgccgaattcagaagccccatacctcaccagctcggggtgagcttcttgagtcctgcacatgggtcctctcaccctcatgtctccagggactcctccgcctgggtaaggggagacagcacacatcatccagtcctctcccctctttgggcctcattttcctagctatgaaatgagggggttgggctagaatgatcatcttgaagcttccctccatctctaaagtattatgatcagtgctttattattttttccctgcctctgatttctctcccactgtgtctgaaattcttttgccattaaattttctcttctttcagagttgcatatctgggctttttatacctagtcctggacagcacattcttcccatggcactgggcttcctcccctggcctcactgtcttttcaggagtgacattagctttttcccagaccgtgtattcctgttctaagcccacacatcatttggggagagatgattttgccatgtactctcacaaatatatgtcctgcacatattctatggaatagacacacacacacacacacacacacacacacacacacacacacacagctcccttcaatacccccgaatatacatgcctgggcataacgtgtgggcaaaaatattcagggacagccaaatgactattttaatgttcctttgtccctgcagggccatcgaactatttatttagtagcttgatgctgtttgcatcaacaactttgccttataggctgttcttcatgtttatgattcttactgtgaaaaaaattgcttgcctaacatctgttctgaatttgttttttctttatttttatttatctgttccccattgaattacatttgcaccaagaacagtaacttgaattgtaatcttcagtgtccttcaggatttctgcacacttcaatacatctcttaattactctttttttattgttatgagatatacatatatacccatgctcacactggcagattggtttgtagcttacctctgcctgtccccctctggggactaagttttattaactgaataaattagatgggtgggtatattcaatagagtagggaggtttatcattacaggtttctttcagatatttttcccccttgctgcccagttctctcctttagccatagctctgttttggagaaagctttattgtagcttgacagagtcataactcaccaggatgagaaggaccacttcatcttatagatgaagaagctgagggccaggggggaggctatcttcctgcctgcttccagaaagcgtggagaatagctgccccagcgccattcttgagaggtagagcacagcttgaccctgcctctccaggctgccaagcctgggggctttccttagcagcaggaggcctcctgggactaccgtgccaccacccacgcaccacaccattgctgcagacccagtcctttgcagagcaagcattttgcatgttttccatgggtgtggctgggttggggtggttagmaaagtgtgcagaagatggtgtgggagaagggcagggcatggagaatcacagtggggtctcttcatgcttgtggactctcctggtggagctggttctctggcctccctcaggctggctcgtgtgactggagccctcattaaccccctgctctcaccacttagaaaccaacccagggaccaaccaagcatattcccagcagtaggcaagaagatccctaaagaagggaagtgagacctgcgtttwttcccctgatacttgggaaatctagcagatatagagacagtgacccaggtatccaagggattggtccaaattcaccatcctgtaactcgaaatgcaatgctctttctaccatcggttctccattctttctggaaggtgtgtcccccttcttccttttgccctttcccacactctttgggggtctatgtccatgtcttccaatggcacaaagtcagaggggatggtttccccatgtcttgaagtgctcactgctggccctgctccagatgttgtccactcaacagacatttcagtctttgctacrtgtacagcatggagctcatggcagtgggagagactacccatcccctccagaaaatgtatcattcatgtctcttttcccaaagaaagctgacatctaatttaggagaaaaacccagacatgggccaagttgctcaagaatgccaggtagtatagtggctgacttctacaagagaaggacaggacacccagaaagaaacccagaagaacaggaaacccagaaagaacaggaaacaggattctgggtagaatcatggaccagtgaaggcagagaaggcttctaggaggaagtaggtcttgaagaatgaataagggggaggtgagggcaaagaatgttccactcagtaaaaacagccagagaaaagcccttgaggtgggaatggttgggggaatggaagttgtggctggagagagggacacagatggattggccagtcatcatcacacactggaaagccttcgttgccaggcgaagacatgtttgttatccttttgttacccttgctaatggcctgtaagctgcttaaagccatgtcttgcaggtcagtttctagagatggggtttgaggggcaagatgtttactagggatcagtgaagggaaggaggagaaagctgtcagtcatcccccagtaggacaaaatgccacctctctgtgttcctactcagcccggccactggatgtgggctttaccaggaagggggtgaccccagtgacatggatctcagcagctgaggctggccctgaaggagctaacagctggaggctccctgctgaccacagtctcggctgctggacagcaagtccttcccagaagggggatctggacgacatgtcttgatgtcatcacatcatgggaactctagttcaaatgaagtttttggcagaatcaccaggttgaagtgggaggtgatctgagggttctgtatgctsagcttccccacagaggactctttgccccgctagacctgagactggctggggccagccacaaaggcagscccatggctgatggagccaacagggcacctctgcagggggcacctctccagggtggtaggagtgaaatagagcaggccccaagttttagaaaatgaccaggggctgggtgaattttggaagcaagataaatgtggataaagagaaaaaaggattctgaggtttcaagtctggcttcagagttgaaasctccttctgccaggaggagtaatagggaagccaagaggataaaatgatttcccagtcctggaaaggcagcttaaaaccatccttccacttgctcttaagggtgaggcgctctgctagcttctcagggatgcacggacagataagatgggctttgtcttgagagaacttgcagagcgatcaggagcttatcaataaacagagggtgatgcaggtcagtagaggaaaggaccaggtgccacagaaactacaaggagcgaagggtccatgaagccttcacaaagaggggcaggtgacccgactgtctgaagttttccaaactaacaagagggcagccggcactttagagggtaaatacttgcaaagaggcagagcagggggaatactgcacatctggggaaccataaataactttttcacagcaagaatgaaaggctgtggttcccaaactgtgtgctgagacaccccagggtgccacagtgaactcacaggggcttcctgggctatggtattttacacattcgtgacaaatacagcaacatctgtcaggcactgtaggaactgctttcagtttatgtgtattatttcttcaaatgtccactaacttgctagaacatgtatacttataaagttgtttgaacttatctacttagaaatgagactgtggggttcttcttttggcctggggagcgctacgaagacattactgagtcactaagggcaccgtgaactgagaacgtttggaaacacaggtataagaggaatggggtgaggagagaagtcaggagctcctgaagggcccctgcttggttacaagtgaagaagcttaaacttgcttcaaatgatggagaaccactagagatttatagggaatagaacgacacagtcagcttctgttttacaaaggtgattggccttggcgggagggttggtttggagacagagagcttcactgggagctcctcagtggtccaggcgagagagacagggcctgaagccagttggcattagacgttggagctggaatacagcacactgygttgacatcatggaattcccactgcatgcttaacaccataatgaacactagacatcaaagataagaagacaagatgtgtttccaccactcacaracgagcagaaagacagtcaggaaaaaaattacaattactagagaaccactaggagtcaaccaggcaagaaaagaggagccgttccaggcraggcagggggaacagcatgtgcaaaggcatgggagtgagagatcatggagggtttcagtcggtatgatcaggattggctcttggcggtggggtggggagggggaccgggggcaggcaggcggggggaatarggwggcacaaggccaaagaacaaggcagggagcagggtgtgaaggacatcatgtgccacatgctaaagacttggcaaaccattgaagggtgttcagtaaagaagcagcatactcagatttgcactttaccaagtcctaggtggataagtggagttggggcccacatgtggacaagcagcaggtcagaatgatggagacagaaacctctgagtgggaggtccaaagtctggccaggaagaggaccagggattgtaccagcctgaaaagggcaaaagaaagttgctgaacaggctctacaaactcctgaaaggggaggggctgagaaagcgctggttcggtccattgatctctgcagggctctgtgaattcagggtggaccccaggcatgagtactctgagggtaacatgggcagatgttgcctgaccctgctcagagtgacagacaggagccctgggaaagcaactccagactccatggcctatgactgtgtcactggctcctcaagaaaactctccctggtagctgagtctgctctgtcattcagctgactcaagcctcttgctctaatgacagacgggagagctgacccaaaagggaaagacactccatgagccaagcagggacagagccccaggactctggggaccctgctttctccatggcaccctgtggaccatccagccccggaggagcgcctgtgagtcraatgcccaggtactcccagcactggacttctccttaactttctctgaactttctggaagttgagcatctcagacactcacaactgtgatctgcagtagcgtctacccctttcctcactgagcctcctgccgcttccacatggacattccatggcaaaggtcagacttgagggtaggacagcagctaccctgttagcatcctcagcctgctgggaaataaaactgtcacggagacaagaagttctcagatgcttggcatttagcagttgtcagaggagctgaaagccctcatcagttctacctgaaaatcagaagtttcccaacgtgcatggcttttttttttttttttttttttttttttttttgagacagagtcttgctcttgtcacccaggctggaaagcaatggcgcaatttttgtacttttagtagagacggggtttcgccatgttggccaggctggtctcaaaatcctgacctcaggtgatccgcaagtgctgggattacaggcrtgagccactacgcccggcctgtgcatgcstttctgttccttctgctgatgtggggggtgttgggctcctgtcaggggcctcctgatgccccgttggggcacttcctcgctcagcttcctcgtccctgacaaagtggcagcagcagggtgtggcccatggaaggtgaccatgaccagcattttcattaaactttactgttcggacaaactattctcatctgacctcataacggtctctttaatcataggaacagtttcaagaaggttgatttgctcaaggtgatacagctgttaaattacaggacaaagccttgagcccaagttcctaagactctctgacacctgcaactgtggcactgccagccgccactctgcctctgacagtctcgggggaccaatccagtgacaaattctccctctcctttttttttttcattgcagaagtcacatgcgctcattataaaacactgaacgttcaaggaatagataagatgaaaaggacagtgccccataatttcctgctccagatctatgccctgtaagccaggggtctgacacagagtatgtgctcaataaatgctttctgaagggactagttaatagaaagaccgactataatttattaacagagctccccatactattttacaatgtgcttttccatttggctgggtcatttggacattttttcatgtcggtgcctgtaggtgaccccctgcccaccaccaccaggaacagtctatagctcggtcacccctaacaggggcaggccttctggaacaaggccaggcagcccccaggctaatcccaacagtctattctacttaagttcccagaaggcggctgtgaactattttggtttaactgactggtcagtttcaaaaaagagagaaaaccactaattaaacaagtcaaacaagtggttatttttgtctacacaatacttcactgatttgcctacattttctcttcaaccaggtgctttggagttgaataagtgaattcttaattgcatagctaaatgtagatgaataactggttaagaatttcttgcccggaaaggagtctatatgtaagtttggattagagtgaaccaaggccttacctctttaattgggctgggggttttctggtccattaagcaagaatatgctctaaatctccacctttgaaagccacagtctgcacagctgggagcctgcctgctttcccttgcacacctacccagcactggagcgggttcaaagacaggccacccgagctaagagcagtcactggaatagatgacagcatgctcaccaccaaggacctgggctggggtcaagtccctgtcttgggcaagtgactttgcctctctaagtctcagtttcttattctgaaaagtggataaaataatgtcctcatccattttctatgagaattacatgaggaaatacaggcaatgcacttagaatgaagcctggtcaatagtaaaccctcaaaataaatgctaacgattgttgttaatctcaaaggtttgagaagaatctacaacctctgcaaatatttcactagtatgagaagtttctttgcaccctataggaagtagacctaaaattcaaacaccccatactttaatttcctttcaaatttgtaggaattataggatttacagttccagtaaactacagagataacttagttttcactcccatatttcagccatggcccagagagtttcagaaatttgcgcctggaacggatttctgtgtgagtggtatggctggatgaacccggatcccacctgctaagctgttgcatattaatctccaggacccatgccacctcagggagcaggaagacactgcctcacattcacacctttgtgcaataccaagatcaggcccttctagggaagtaagctttgagaggcagaatggcactgggaattcacaaggttgagaagaaaaaggggcaccatactagttaggacttcctgatttcaaattatgggaaacccaacacaaactaactttagcacaaactaactaatgtaagctaggaggatggaatgaagagctgcaggaggaaagtttggactctatattgtgctttgtaggcagtctgtctatctgaaatctctgctggtctctattagctccttctgcagaccggctctctccatgtggtacaaaaatggctgccatcagccctagattaatatattctcagtttagcagctccaggagaaagtcagagcttttcaccccagcatccatgtagaaatcccaatgaaggatccataccggcctggagtgggtcatgtgtccaccccttggaccagtcactgttgccaaggagatgagatactaggattggccatgcctgggtggtgagcccaccaccatgaccagaggggcagggttctatcactgagagctccttcagaactgcatggaatgcgagggtggttcctcaagatgtagtgggcagacaaaagcaggtgagccatcccagacacccaaaacgaaagctatgtgtgcctaggacacacttcccttacattttttctccattcaaggtcttttcaggagctcctcaaactacagatgagagtttttgtaaatataaattcacaagattacacaatttacatgtaaaatgggaccagttttctcacgagattcataaaccagctctgaagcaattctaaaggaattgttgcaaaattgtttttagcattagcaatattactacaaaaaaaaaaaaaaaagaagcaggaagactcccaaggtgactacttggaaggacaactttcatttgaaagtagaagtattattttgttcctttaaaaaaatctagattatgcgtaagattattatgataactaaatcaatacaaatatattaccaaaagttgcgtgtgccctacagtgtaattgctttccttttagatctaagaatttagggaaatgagaatgggtgtgaactttggttaaatatagagcaggttttcacccaatcagattgggtccacaatctgtcaatcacatcaggatcccctgggagcttgttaaaataggaggtgcttgggtcccaccccagagactctggtctggtaggtctgggtagggccaggcattattatttctgaatgctccgcagttggttttgacaagccctcgaggctggaaaccatggccctaggacagcatttctcagagtatggaaagagtcctcttgcatcagaatctgagagctggttaaaatcagattcctgggccctacccaggcctgctagattagtcttggtagggagcttggctgtgaatttagagtttattaagctccccagtgactttttaaaaatttttaattttgaaataattatagatggacaggaagttgaaaaaaatatgtatggggaagtcctatgttcccattacccagcttcccccaatggtaacctcttgcgtgactatagtacgttatcaaaaccaggagaatgaccctggtatgacccacagtgcttatcatattttttccaggtttatatgcactcgtgtgtgtgtgtgtgtgtgtagttctatgcagttttatcacctttgtagatctgtgtaacccccaccacagccaagataaagactatcctatgaccataagctctctagaactacccctgtatagccacatgcacccatcaccacccccatccctaacccctggcaaccactaatgtgttctccatctctataattttatttcaagaatgttatgtaaacagaatcatacagcatgtaatctaatgatatttgttttttcagtcacaaaattcccttgagattcatccaaatttgtgcatgtaacaatagcttgttcttttttaaattgctgcatagtattccgttgtatagatgtactacagtttgtttacccatctacccaatgaagaacatttgaattgttttcagtttttgcctattacaaacaaagctgctgtaaacattcatgtacatgtgttctgtgaatgtaagttttcacgtctctgggacagatgttcaagagtgcaattgctgggtcatagcataagtatgtggttagttttataagaaatcgccaaagcggctttatggttttaccttcacatcagcaacttataaatgatccactttctccacatgtttgccagcctttgatgttatcactattcttttaaaattttagcctttctgatagatgtgaaatgatatctcattgtggttttaatttgaacttcaccaatggctaataatgttaaacatcttttcatgtgtttacttggcatctgtatatcctctgtagtgaaatgtctgttcatgtcttttgcccattttctattttatttttccataagttattgggggtacaggtagtatttggttacatgagtaagttctttagtggtgatttctgagattttggtgcacccatcacctgagcagtacacactgcaccatatttgtgtcttttatccctcaccctcctcccactctccccaacccccaagtccccaaagtccattgtatcattcgtatgcctttgtgtcctcatagcttagttcccacatatcagtgagaacataggatgtttggtttcccattcctgagttgcttcactcagaataatactctccagtctcatccaagtcactgcaaatgctgttatgtcattccttttaatggcagcatagtattccaccatacatatataccacagtttctttatccactcattgactgatggacatttgggttggttccatgattttgcaatcgtgagttgtgctgctatgaacatgccatgcaagtatcttttttgaataatgacttcttttcctctgggtagatacccagtagtgggattgctggatcaaatggtagttctacttttagttctttaaggaaactccacactgttttccatactggctgtactagtttacagtcccaccagcagggtagaagtgctccctgatcactgcatccacgccaacatctactgtttttttaattattattttttgattatagccatttttgcaggagtaaggttgtatcacattgcagttttgatcggcatttccctgatcatcagtgatgctgagcattttttcatttgtttattggccatttgtgtatcttcttttgagaattgtctattcaggtccttagcccactttttgatgggattgtttgtttttttcttactgatttttttgagttcattgtagattctggatattagtcctttgtcagatatatagattgtgaagattttctcctactctgcgggttgtctgttgactctgttgactgttccttttaccgtacaaaagctctttactttaattaggtcccagctatttatctttgtttttgttgcatttgcttttgggttcttggtcacgaaatccttgtctaaaccaatgtctagaaaggtttttctaatattatcttctagaatttttatagtttcaggtcttaggtttaagtctttaatccatcttgagtgaatttttgtatgagagatgaagatccagtttattcycctacatgtggctagccaattatcccagcatcgtttattgaaagggtgtcctttccctacttcatgtttttgtttgctttgtcgaagatcagttggttgtaagtatttgagtttatttctgggttctctattctcttccattggtctatatgcctgtttttataccagtatcatgctgttttggtagctatggccttatagtatagtttgaaatcagatagtgagatacctccagatttgttctttttgcttagtcttgctttggctatgcaggctcttttttggttccatatgcattttagaattcttttttctaattctgtgaagaatgatggtggcattttgatggggattgcattgaatttgtagattgcttttggcagtatgatcattttcacaatattgattcgacccatccatgagcatgggatgtgtttccatttgtttgtttcatctatgatttctttcagcagtgttttgtagttttccttgtagagttctttcsactccttggttaggtatattcctaagtatttttatttttttgcagctattgtaaaaggggttgagttcttgatttgattctctgcttggtcattgttggtgtatagaagagctactgattggtgtacattaatcttgtatctggaaactttgctgaattttttttatcagttccaggacctttctggaggagtccttagggttttcaaggtaaacgattgtattgtcagcagtgacagtttgacttcctctttagcgatacggatgctctcctttctttcttccttccttccttcattccctccctccctaccytctctttytctttctctctttytctctttctttctttctttctttctttctttctttctttctttctttctttctttctttctttcttctctctctctctctctctttctctttctccctctctctctctctctctttctttctcttgtctgattgttctggctaggacttccagtactatgttgaagaggagtggtgggagtgggcatccttgtcttgttccagttccgagagggaatgctttcagcttttccccattcagtattatgttggctgtgtgtttgttatagatggcctttattacattaaggtatgtcccttgtatgccgattttgctgagagttttaatcataaggggatgctagattttgttgaatactttttctgcatctattgagattatcatgtgatttttgtttttaattctgtttatgtggtgtatcacatttattgacttgcgtatattaaaccatccctgcatccctgttatgaaacccacctgatgttcgtggattatctttttgatatgttgttggatttggttagctagtattttgttaaggattttagcatctatgttcatcaaggatatcggtctgtagttttctttttcggttgcatcctttcctggttttggttttagggtgatgctggcttcatagaatgagttagggagggttccttctttctctatcttgtggaatagtgtgaaaagtattggtaccaattcttctttgaatgtctggtagaattctgctgtgaatccagatgcaagtccttagtcaggtaggtagtttgcaaatattgtctcctagcctgtagcatgtcttttcatcttcttaacagtgtctttgaaagggcaaaaatttttaattttgatcaagttcaactttttgatttttgtcctttatggattatgttttagtgtcaagtctaagaactttttgccaagctctaattttcaaagattttttttttacttttctaaaagttttatagtttcacattctacatttaattctgtagtccattttgagttcattttttgcataaggtatgaggttcatattttgcctatggatgccaattactctagcatcttttttttttttctcactctgtctcccagtctgtagtgcagtggcttgatcttggatcactgcaacctccaccttccaggttcaagcaattctcctgcctcagcctcctgagtagctggcactacaggtatgtgccaccatgcccagatagttatttgtatttttagtacagatggggtttaccatgttggccaggatggtctcaaactcctgatctcaagttatccacctgcctcggcctcccaaagtgctggaattacaggcgcgatccactatgcctggcctactctagcatcttttgttgaaaaacctacccttcctgcattgaattgcttttgtatctttgtcaaaattatcagttgagcatatatatgtgggtctacttctgggttctctattttgtcccattgatctatgtgtttgtctttctgccaataccacacagtcttgacgactacagccaagttttgggatctcgtagactgattcctcccactttattcttttttcaaaattgatttagttattttaagttctttgcctttccatataagttttggaataagtttgtctacacctacaaatattcttgctgagactttgrttggaattgcattaaactgatatgccagttttgggagaattgatatttttacattgtggagtcttccaatccatgaacatgatatgtttctccacttagttcttcttttatttctttcatcaacattgtaaatggcaatgtgctttcatttggtttacacatgttcattgttagcatgtagaaatgctattgacttttttttgtatgttgatctggaatcctgcaaccttgctgaactcacttattagttctaagattgtttttaaattttttagtagtttctctgtagatatcatgtcatctcaaaatagggacaattttatttattccttttcagtctatatgcttttcatttattttcttgccttattgcactggctagaacttccaatactatgtcaaacaagagtagtgaaagaggacatccttgccttgttccccatcttaaggaaaagcattcagtctttcacattaagtatgacattagctgtaaggtttttgtagatgccctttatcaagttgaggaactcctctctattcctgagagtgtttatcatgaacaagtgctggattttgtcaaatgctttctcatgtcaactgatataatcacataattttttatttttcaggcagttaatatggtgaattatattgattgttttgaaaatattgaatcagccttggacacctagaataaataccacttggttttgatatataagtctttttatatagtgctagatttgatttgttgaagatttttgtgtttaaggtcatgagagatactggtctatacttttcttgtagtatctttggctggttttggtatcagagtaaacctgtcctcataaattgagttgtgaagtgttccctcctcttttatcttctggaagatattgtaaaattagtgttaattcttcttttaatatttggtagaattcttcattgagaattctacattagagaattgtactctctaagtacattgagtaccacatcatagggtggtgtaatttttgcttcaamcatcaagtatgatttaagagactccaaggtatcctggcctggagatgtgtttttcaggaaattttaaattatgaattcaaataaaaaatatgaataattaaattttgaaatttaattaaaattattagtagttttgtggttgtaagattattcagattgcccacttcatcttgattgagctttaatagtttgtaattttcatagaattggtcaatttctttctagtttttaaatatattagtctaaagttgtttgtagtagacccttatccttttagtagctgcagtgtttgtagtgatatcccatttcattcctgatgttggtgttttgtgtcttctctcttttatctttgttagtcttgttcgaggtttatccattttattgatattttccaaagaaccagtttttcgttcatcagtttttctgtggtttttgttttcaggttcatagagttctgcacttttttttttattatttcctttcctgtgcttgataaggttctttgttcttctttttctagtttcttgagatgggagcatagacgattcatttaagatctttcctcttttctaaagtagcatttagtgctatcaatttctctctccacattgctttagctgcagccacacattttgatatattgttatctagtcattacattatattcaccattatagtagtgtatttgttctcttttattccttctgctccttgtttcatttttcttacctttttgtggataacttgaacatttttcagaattccattttggcttatcataattttaaaatagtttttcttagttcttgtgtaaatacacatatataatttatcacaatctatgagtatgaatgccttaccattttgagtgatatgtagaaatcttacttccattttggaccttttagcctccttacttttaaaatataattgtcttaagtatatcttctaagtgcattgagtaccacatcatatggtggtgaaatttttgcttcaaccatcaagaatgatttaagagactcctgagaaggatagtctattatttttatccatttcattgtcctttcctttctgaagttccaaactttcttctgttatcatctccctttcctttctgtttggagaacatccttcagccattctttaagggtaaatatgtgagtgacaaaatctcttagttttccttcatcagagaaygccattatttccacttttctcctgaaggatactttcaccaaatagatgacttgtgattgacagctatttcctttcagcacttgaaaaatgtgccacttccttctggcttccatggttcctgataaaaaaaacctgctgtcctttgaactggtgttccctatagataatacattatttctctctggctgttttcaagatgtttttctttcttttttagttttcagaagtttaactatgaggtatcttggcatggatttccttgggttcatctgagttgagattcactcagcttcttgaatatgtaggtttatgtcttttgcaaaattcagaaattttcagctgttatttcttcaagccaaggtgacttttaagcacattgtatatttgagaaacattgctctggaggggggttgagagatccaaggacttctcaaattgtatgcagaatgctgttaagtgtccacagctttcattagattctcaaaagactccatgaccctcaccatacattttataaaagaattggtttatggccttattgagttgttttttgttttcttggttaaaatcagtaaaagcaaacaaacaaacacaaaaagtagttagtattcttttctttytttgtaccacatctgttgaattcctgtttctcaaagattttcctgacaattttggaaaatacgatgactcaggtaaatgttttccaagtgcctaatatgtgccagacaaatatttttattgttttccatagttaatgagaaggagaagaatttaaaacaattaatatcatttgggtttatgaaaagttcttggtaaataagtgctagagtaaaattggctgcttttcagtgtgactttcccctttaaaatctgttccttactgctctgagctggatacaccagcgatcaaattacatccctgaaagtataatttcatacaccgaaaacatgtcattacacagtgggccgcttgtcatcactctggcttgctttgcacagttggtagtccggcactcacggttcccccaagcaggcttgtccctggctcaactgctctagctgattcctccagccagcagaccctcacctcctttgtcaccccttattcctggactaacttttgctcatcttccagaactcagcttgggaagcaccacctctgggaagccttcagtctcttttctccaagcattgagttgagtgtgcctccagggtcactcatgcctgccagaacatcacgctgtatattaattgcctaattgtctctcctgtcagatagtcagacccttggaaactgtgactgggtcttgatttgctttcgtgcccccagtacttttgtaagtataatatsacatgtgtttacgcactatctccagttagagttcacgccaccagctgactgactgactgagcctttcatccatattttcattaatgtcattaagtatctgttgagggctgggcacagaggttcatgcctgtaatcccagcactttgggaggccgaggtgggcggatcacttgaggtcaggagttcaagaccagcccagccaacaaggtgaaacgctgtctctactaaaaatacaaaacttagctgggcatggtgatgggcgcctgtaatcccagctactcaggaggctgaggcagaagaatcgcttgaacccgggagggggaggttgcagtgagctgagatagcaccactgcagtacagcctggacaaaagagcaagactccatcacaaaaataaaaataaaattttaaaaagtacctgttgagctcctttatatataggtgtggcgaccagatattcagttcttcccaagcaggtttaatctttcctcacaagcatctgtttattaattcactttagactttttctgagaattggtataaaggttattggtcttttgctagaattcctatctttccgttttggggaaatatggataacaccgacctctgccattttccttctttgtcttactactggatcttatgaaccctttattattacatttacatgtatagctctgtctttcctattaggctgtaataagctccttgggcagggagtgtatcttattcaacccagagtctccagggaccggtgcaaggtggcattccatgagtgctggtggaaagaaatttgatgttagatcatcacagctatatggttgcttatgattggaacatatgtttcctcatcgtctccatacctttacttcctagttatcttttatccctcattctaagctaccgtgaactcttttttggaaaggagaaatgggtaatgcaacacattttaatgcattttttattcctcccaggtactatcttggtcgtcggatgtttattgttatttctgagccagacatgatcaagcaggtgttggttgagaacttcagtaactttaccaacagaatggtaygtagttttctttccgcatatagatggatggggaattgttctcagatggagacactgcatgtcagatccaatggggatgcaatcaggcctctgatcaggtttatgtcagttccactcaaaactaagctcctcagtgaactcggtttttcaaaagagatctatgggactggtacaaaagagtaacatttacatttaagaaatgcttcaagaaagctaaagctcaagggaagctgaggctattaaaaatgctaaaaccaagagggttttctaaagctgggttcaaagccgggggaatccagagggcacaggccaagtgactgacggagaatgagctaggctaataaatattagttggaaagcaaaattttgaggttcttgcacttacatctttcccagaaagtataagagtattaaggctggaaagggaagtcaagcaaaattaggagagaaatttgtcccctagtaagagaaggaaactttaagagggctcctttacattaggtcaagtctccagcctacatgcatgtacatatccctttgtttttggaaagtaaatgtcctactatttatctttgatgagaaatcccaaaggatgggcgaggtgacagaaaatggcagagatcaggccaggcacagtggctcatacctgtagtccccacactttgggaggccaaggagggtggattgcttgagttcaggagttcgagaccagcctggccaacttggcgaaactctgtccctacaaaattacaaaaattagccgggtgtggtggcacacatctgtagtcccagctacttgggaggctgagacatgagaattgcttgaacgcttgaatctgggaggctgggagtgggaggggctccagtgagctgagatcgcgccactgcactccagcctgggcgacagagacgctgtctcaaaaaaattaaataaataaataaaagaaataaagaatgaaaaaatggcagatatcagtgctaaccattttccaaaaatagggagataggcattctagcagagaagaccagtaacctttacgttgattcttggaaaaagtctaaagtgaattaataaacatgtttgtgagaactcagagaatcaccttgccaaccatttttggggggttccaattagacctcacttttcattcttttagggaagtacgtattcattcttttgttgattatgtggcaaactttttcatacctrccatatgccaggcactgtgtaggtgctgactgtaaagagacagtgtccctcgaggaactctcggtttagtgagggaggcagacaaggaaagggaccagcacaatgcagtgtggtgagtgctcctgaggtggggagcccaggccaccaggatgcagacagaggaaagcttattgggtgtgaggtgcttggggctgagtcttaaagaaattagagaaagtccccctscctgtgttccgaactaggtgagccatccagagtgtgtccttgtcatcgcaagagcttatgagatgagtacaattatcatctctattttatagacaaagaaactaaggttcagagaggctaaatgatcaaccctggtaacatggcttaacacgaggaagagcagggattcatgtgccatctctcaacttaagtctagagctctttttactgccaaagctgtgacagctgcctcagtgacatttcaggatgtcaaggttgagtggagtaattggccactcacccaaaatttgctcatcttcttccagccccagagcatcatgcccaactccagacatcacgtggcctctagagggatgtggcctggagggaggcggctggcctgctacctccatcccttcaggatggccgaaggaattgcagaagtttaactgcttctctgctgcctctagattctctttcccaaacactgcattgctatctcctcgctcaaagtcccctggaagccgtctgtcaagaaactgattctgattattaaatgcagctgtagcttgttgctccatcagcctcagcaaggagtgctgattaaagaagttggagaagccaataagtcaaagtgcacggaccaccaagccacatcctggcaagcagtaaaggtactcccaggagcctgtcatagcacttgagactgtctgagcccctaagccatgagacggcacttgccaactggtgtctccatatttcctcccatgataccaggacatgtgaccctgagagctgacctagaagaggtcaatgatttggcctgctaggggcagacatactcaatgcacatgtccaagcaaggaggacacaataatattgccctcagcttygatcaatttatcctccaagccatttgtctgccgtttctaatttctttcaccatcccctcacccacccctccacgcagactaggtccagtgccccaaactccagagtagagttccaattttcgtcctcttccactcagcacaggattaagccttcaggactaagttcaagttccctagacgatatttaagggcccttgtgtcttagatccattgtgtgtgctccaccctgtctctcactgctccccaatacaaatcgtcactccagcctctccctgctcaccctcacctgctctggagagacctgacctctgccttgctcacgctgacactgcctcagaattgaaggcagtgtaacagtggggctcatattgattatgacgtgagcttgagcacatatctttttttttttttttttggagacacggtcttgctctgtcacccaggctggagttcagtggtgtgatcagagctcactgcagcctcaaactcctgggcccaagtgatcctcccacctcagcctcctaggtagctgggactgcatgtgtgtgccaccatgcctggctaattttaaaaaaaaaaaatttggcagagatgggggtcttactatgtcgccaaggttagtctcgagctcctggcctcaggtgatcctctcaccttggcctcccaaattgttgggattatagccctgagccactgtacctggccacatttcttaacttaaaaaagagctggggcagctctttttaaaaatatccatggaaagtggagctgaatcaacatgactcagcagaaatggtcacaaccagtggcagaacttcttattcttggcctcctctcaaggcctggagttgggggatatgatccaccttactgggctgtcataaagccacatgggatcatgcatataacctctccctctacacagtacttggcaggtgacacattactgcttctcacaagaaaaccctccacctcttccacacccatccaaactcttgctgttcttcaagacactcctcagatactgcctcctccaggaagccttccctgcctccatccacatgcacytttccccttccctgaactctggcagcgctcaccatgtgtgtcactcgttgtcacagttgatccccttgtgccttccagtatttacagtgaaggaggatatggctttcactctagcttgattattagctctttaaggccaagaactgtatcttgtattttttttaaaccccatgacataaacacatattgactcttcagcatccaatatattcttgttccaactgaatggaatttccatcaacttgacattcctcccagaagaatgaggtattacttgaacctggagttgcaatatagtcttcttcgtctcggtcattcacaaacacgtaaaaagacccatcatagataagatctccaggaaatcccagtgtttatagttttccatctgggaatgcatccacttatgtgtagctttgtttatggtctttaagccaattccatatcgatggtaaaacaacccttagtgactcaattttttaaaaaacagtctttaaagtgggattttctcacaggtttttgaaagtcaaattaaattgggttctgtggttccctcttatccatatgcttatttatctgctcaaagaactcaaggagattagtgagacgtgatttctccttactgacaccacgttgccttccctctaataggccatgtttacttaagcgttcagcaattcagctttattatacattcactcggtaaacattaaatgcttactccatgcaggctgctaccaaacggtcccttgtgatacagaaaatacctcggcatattagtttgataaattaagtgaaaaggaatttaaataatgcatgctctcattctccaacagggagagcccatgtctgctcacaaattcaggcttgagttacgttgagttttgtccctggacagcctggtggagaagggccctgatttgggaagctggatttagctctgaaatttgacatgagccgtaagcatcccatgagggatccatagagcatattcactggaggtgggggtgatgcaacagggagctccctgacatacaacaacattgaacaaatgtgtgaattcaaatatcatcctgtgaaatattcttttccaaactccagaacactggctggagcagactgtgggttggatccggagcggcagttcttaatgtcatgctttcccattcacagtttttgggcctctggagtctgtgcaatgtctctgcttcatcttgctcattttccacgtggaccttgtaggtctctatcaatgtcctcagtgcttcctgaaactgctccatgatggtgcaaccacagcttatcattaaacccaaatcaatcttcttggcacttatagaagctcagtcgtcctggtacatcaggactcggatgtttctatttagatattttcaatgagctcttctttgctgtcaggtacggtacctaatgaaaccatagggcagctcttttttaaatatctgtggaaaatggagctgagtccacatgactcagcagaaatggtcacaaccagaggcagaacttcttgttcttggcctcctatcaaggcctagagttagggagctgtgggaagggtgataagaggtaagccagtctttggcccatgttagcttggtctggtcagataggcatgtcagggatgtgtcaaaacactaagcctagtgctttggagatgtgggttctggtctggagtggcagtatggagtgccatctctcaggtcctcatgagcaacacagaggtcacctctccaggcacaggtcgagccacaccactgacacacaagagtcacgtccaaagccatgtgatggacgtggtgggtggttttatcccgaaccatcaatacccggcaccctggctgccccaggttcagcctctcaggggctgcttcactcgctctccacacagctgtgaacattgcaggatgagtcactgtgaaaccacaaactccttggcattggtgaagatgactaaagttataggcaaattagtcactggaaaccttcctgtcctctgtatctgcagcagcctcctatcgaaggaagaaaagagtatgttggctcattgcagagctaattggcaaggaaagctcaattcagggctacaggtgagtcagacgcccttgtgcgggggccacagggacccgcctgctggcatccattgaggagagaggggcccttggcagacttgccataaaaccgccccccttgaactcattcctacacctgtaaccactgacagtttttgaaaactgttcacctggagttcctggttctctttctcttaaatcaaacattgartaaatgaagacactcagatgttcaaacatgtgcatcaagattttacttgtgagagtggttgccatgcatgacctagggaagctctcatggcttcagtcaaaccttgccaactttttttagctgtgcatttcttgagaaaggtcaactcacattacgrgtctacagctctgagcaagggagaagttcttcctgaaagcacaaacagactacagagggcagtgaaaccagaaacacaggtgtgcaacctcatttgcctgcccccgtctctattttgaggcctctttgttttatgtgacctccgtctccttctctgccgcaatcttcttcttataacacccactttcttcttttaatttccccctcttctaagccatagcccagtggtatggcgaaaggtctttgctgtgcataggaaaccctccaatctgaactggaagcttcctgttgcaggatgggctgccccattggaattcccaggtgacagtcgcaatgggatgcctgtcccctgcaggtctcccatttcacctgcttttctaatgtctggacatggctaagtcctagaaaagccagatccatggcattacatttaatcagtacaacacactgagcttcgtttccaacatggtagctaagttttaattctaacatctttaaaagtactgagtgtcttgtgatgccttgggaacacaggaatagtgttaagtggtgttgattctcaatgctcaaatgtacttctctctgccttgcagagatttttctaaaatttcaagaccttgttgaaaatgatttcatatttttgtgtcttactagactcttggttcagcaggaagctatctttatatatttttttaacaaaaagaaattagtaaaagcttgctctgatatttatgccatatttccctaacttttgtcgtggcagaagtagaaataagtgtgtaaaccaggagattaatatctacaatttaggcatgagaatagagaaataaaccataaaatcaattcttatctctcaatggatatattccagaacattccatggaaatcaagtgactaagtcctgatcctccctgtctttctccgccccaatctccttcttatgacattccctttcttcttcccattttccctcttctaagccatagctcagtagtatggtgaaatgtctttgattttagtttaaagaaatgaaatcagattccagatttgcwacctcttattagttgtgtggccttcagacaatcctttaacctcctgattctcaatttcctcctgtgtaaaatacattagactagctaatccctaaggtctgtttggtgcccagttcacgtgaccgttggcagccacagggagccacggagtcccaccagcgtcccatagagccacttggagcttcaggtacaaggaacaagcccctcktaggccccctcaggaaaatttattctcgcagccaagcatgtcaagtgcaatatcaggaacacccttgtccttcttgaacactgcttctggccagaaactctgctgagatctgttggagagtttcctgcaaagataagagttaacaagcccccagattcccttccccgctcaggaggggccctcactrtcagctttggggctgatagaagcacagttccaagcgcctggcttcctcctcctccccagtggataaaatgctggaactccgtcaggcaggactgccataattagaagaggcccctttccagcagctgaagctgactaggcagatagagcccaaatttgtttttagccaccacatgcccctgagctgacccctcragctgtggacacatctcacaacctcacccggaggccattctctcaggccagtcacactctcccacagagagagcgaagatgatgtcaaatctatggccaccttctaccagcagagggaatgaatgaaaactgacatgtagaagagtaagaccactactgttttcatttttggtattttttttttacattttaatttttttatactctatttttagtaaaagggacacctttactatttcaaaccaccaaaatataagccctatttggttcaaatctttgtacagccagatagcaatagatataaattgacaatggcctcaagtatagaatttggggttatacaagtgacagaattcttgagtctcagttgattataatataatgaggggacagtgccaggtctttcacgtctccaggtgggaaggggacaagttgcacgatggctgtcctcatctgtgcctggttgtgtgagaattagaaacaacgtttgtaacagtggtacctagtctttgtgaccgtggtcctctttttgatattaatatttttgcagactagttggcataaacaagttggctctctgtactcacattacaaccactgaggtataacactatctcttggagtccttagaagcacctcgctctgttcagctggcctctcagccttgtgtggctgtttcagaactgttgatcatctgtcaagtcatcccagagatcatctagatcttgagtccatttcttgcatgttccagaacacaagaaaacatttgtggctatagcttcatattctatcatgcctttcatccctttctcccgataatacatgaacccggttacagcagaaatgcattccatgcatttgcaacactctggaaggagccagtggttcttgtgtggctttaccaggccagtcgagaatcactgggctggtgcatgagaaaccttcagtaagtggctgctgtcttcatgcacccatggaatgccgaggtgttggttttcttcaataacctgctcctcagggcagtgtttcctaattgctggagaatgacccaagagttgatgaaataatatgaaaagtactgtgtttgctgtaagatggacaagtattggtgatataggccaccccactcccaccctccattctttgtcttgatagttccagtcccagtacagcacctggcacacagtagttgctccatcattattcacagcataatcacagacaccattcagagcagagcttgtacagccctaaacataaagtgcagcaaacccagctcaagatcattgaagctagcagccattcagctcctgctgtgggatggccagggagggtcagagactgtggtcttgacacattctgtgtggggttcatccacatcttcctaaatgcccaaggcatggctatttgaagcagagcaagtaaagacaacgaggggtccctctgctgggttttctgtccccctctggctgccagcactaatctagcctttgaagaggggcagaaggggcaaagttaaaccacactttcctctcttacctgttgtcacccctctaatgacttttcactttctctgctcaccttctccttcctgcctcttttagaaatgggaaacaaagggcccatagrccctaaaaggggccaccctttgaaggaggagacatgaccacaaatgtcaccctttgatatcctaatgggatccatgttaaaaaaggaagtttttaacctggtctcagaggacacttgcaagagatgccaaggaaggcagtgtgatcatcccaagtcaagcagcctaacrtgagcctgtgagagagaaactgcaatccacccgcaacgtgtggtcatcaaagggcggcaaccccagttaccagcttgagattaaaaacccaaattaaaacagggccaaaggattcctgtcagctcttaacacctctcttaaaatgtgaccactgtctgaaaaccattgtttggctgatgaggtctaacttcattacacatcacagtaggacactccttcctgagaccaggcactgctcccatgagtgcagtaggacagacctcctctgttcctgacgatgataccccaatacagcccgacaagcgtgtgctcaatgaaggttcccagatctttttaatgcgactttttgcaggtcaggttgcttccatcacatgcactgaacaaccaaattttaaacctaaatatgaaaccttgtagttacatctgttgattttcgtcttgttagtgttcatccagcattcaagtctgtcgaaattaaatgtttattattccttagtatttttttaaattgaagtcacttccatacacaaaccttgagtgtaaagctcaatgtattattgtctatgtattcccctatgtgacaccacccagatcaagacacaaacatttccarcactccagagggttccctcatgcctcttctcagtcaacccatccctaccatccagaggaaaccactcctctgacatcaatttgtatagatttctcttttcctgctgttgaacttcatgtaaatgtaaacttacagyatgtatccttttgttctggcatcttttgctcaacataatgtctgtaagagtcatccataccacgtatttagattaatatagccaggtgtggtggctcagtcctgtaattttgcactttgggaggctgaggcaggaagattgcttgagcccaggagttcgagactggcctgggcaacaaagtgagacccctgtctctacaaaaaaaaatttttaaattagccaggccccgtggtgtgtgcctgtggtcccaggtactcaggagactgagggaagaggatgccttgagcccaggaatttgaggctatagtgagctatgatcgtgccactgcactgcagcctggggacagagcaagatcgtgaacatagtttgcatttttcattgctatgtagcattccaatgtatagaaacaccacaatctattcctctgtcaataaacatataggtttccagttttttgctattatgaattaggttgttatatcaacaggcatttatgaacacctaggagcagcatcgctagcccacgagagtaggtgcatggtgggtttttgtacatactgccaaacagttttccaaaggggttgagccaatctatactcccataaagtggagttctagttgttccagccttagccagcactttcatcttgccattatttttcactgtaactattccaggggctgggtagtagtggtatctcaccacagttttaatttgtatttatctggtgaccatgtcattgagaactttttctttttctttttttttttttttccccgagatggagttttgctcttgttgcccaggctggagtgcaatggtgtgatctcagctcactacaacctctgcctcctgggttcaagcgattctcctgcctcagcctcccgtgaagctgggattacggacatgtgccaccatgcccggctaatttttgtatttttagcagagacggagtttctgcatgttggtcaggttggtctygaattcctgacctcaggtgatctgcccaccttcacctcccaaagtgctgggattataggcgtgagccaccgcgcccagccgagaactttttcatatgctctctggccatttgaatagtctcctttttaacaacgtgcctgttgagtctttgccccctcccccacttttattttaaggtgtttgactttttctgattgacttgtttttctttgcatgttctgccttgagtcttttgtcagataaatgtgttgtgaatatcttctcccagtccatggtttgtgtgttattttcttaataatatcctttgataataaagtccaatttatcaaaatcttcttttgtggtattgcttttggtattctctttaagaactcttgccttatatacaaggtcacaaagatattctcttggaatcattatggttctacctctcactattgggactatgatctatctccagttaacttttgtgtatagagtgaagtatggatcaaagctgattttttttctctgtattaatatccaattgccccagtaccattgttgaaaagaccacccattcccccttgaatagcacctttgtcataaatcaagagatcatatgtgtgagtctacttctggactctgtcccatttcattggtctttttgtttatccttgcaccaatatcacactctcttaaatagcatagctttatcattgatcttgaaagatggcagtgtggccaggcacggtggctaacgcctataattttgggaaggccaaggtgggggaattgtttgaggccaggagtttgagaccagcctgggtaacaaaccaagacccagtctctactaaacaaatatatatatatataattagccaggcatggtggcgcatgcctgtagtcccagctactcagaaggctgaggtaagaaaattgcttaagcccaggaggcgtaggttgtagtgagccatgattctgccactgcacttcagcttgagcaacagagcgagaccctgtccgagagagagagagagacgcaagagagagaaacagagagagatggcrgtataaattctcgtggttattctagttcttttggttccatatatctgtttacaggaatcagcttgtcaatttttaaaatgtttaatttttgtgagtatatagtaggtgtatacatttatggggtatatgaaatattttgatacatgcatgtatcatgcatgcatgatacatgcatgcaatgtataataatcacatcagggtaaatggggaatccaccatctcaagcatttttcctttctttgtgttacaaacaatccaattataatcatttatttttttgccctgtcttatggtgctgatctttcggttattttaaaacctgcaattaaattattattgactatagtcaccaaatactaggtcttattcactttttctatttttttccacccattaaccatccccacctccctcgacactctttcactactcttcccagcctctggtaaccatcattctactatctccatgagttcaattgttttactttttagctcctacaaataagtgagaacatgccaattttgtccttctgtgcctggcttatttcgtttaacaaaatgacctccagctctatccatgttgttgcaaatggcaggcttttattcttttttatggctgaattgtactcccattgtatatatgtaccacgttttctttatgcagttgtctgttaatggacacttaggtgcttccaaatttggctcttgtgaatagtgctgcaataaacatgggtgtgcagatatctctttgatatactgatttcctttctttggggtatatacctagcagtgggattactggatcatatggtagctctatttttagtttttttagttttttgaggcgcctccaaactgttctccatagtgattgtcctaatttacatttgcaccaacagtgtatgtgggttcccttttctccacatccttggcagcttgtgttattgcctgtcttttggatataagccattttaaatggggtgagatgatatctcattgtagttttgatttgcatttctctgatgaccagtgatgttgagtaccttttcatatgcctgtttgccatttgtatgtcttttttttttaaactgtcgattcacatcttttgcatgtttttttaataggattattaggtttttttcctgcagagttgtttgagctccttacatattctggttattattcccttgccagatgggtagtttgcaaatacttcctcccagtctgtggcttgtctcttcactttgctgattgtttcctttgctgtgcagaagttttttaacttgatgcaatctcaatcrtccatttttgcgttggttgcctgtgcttgtggggtattactcaagaaatctttgcccagttcaatgtcctagatattttctcaagtgttttcttttagtaatttcatagtttgaggactcagatttaagtctttaatccattttgattcaatttttgtatatggtgagagataggggtctagtttcatcattcttcatatggatatccactttttccagcaccatttattgaagagactgtccttttctcaatatttcttcttggcacctttgtgaaaatgagttcactgtagatgtatagatttgtttgtgggttttctcttctattccattggtctatgtgtctggttttatgctagagccatgctattttagttactatagctctgtcatataattagaagtcaaggattgtgattcctccagttttgttcattttgctcaggatggctttggctattttgggtcttttgtgtttccatacatattttaggattgttttttctatttctgtgaggaatgtcacatagagattgcattgaatctgtagattgttttaggtaatatggacattttaacaatattgattcttccaattcatgagtatggaatatctttccattttttttgtatcttcaatttcttgtatcagtgttttacagtcttcattgtagagatcttttacttcttcagtaaagttaattcctaagtatttcattttatttgtggctattgtaaatgggattgctttcttggcttctttttcagattgttcactgttggcatatagaaatgctactgatttttgtatgttgactttataccctgcaactttactgaattcatttatgagatctaatagcttttcggtggagtctttaggtttttctaaatgtaagatcatatcatctgcaaacaaagataatttgacttcttcctttctaatttggatacgtttatttcattctcttgactgattactctagccaggacttccagtactatgttgaataacagtggtgaaagtgggcatccttgtcatgttccagatcttggaggaaaggttttcagtttttccccattcagtatgatactagctgtgggtctgttgtaaatggcttttatgttgattgatgttccttctatgccttttaggatttttattatgaagggacgttgaattttatcaaatgcttttttagcatcaattgaaatgattatgtggtttttgtccttcattccattgatatgatgtatcacattgattgatttgtatatgttgagccatgcttgcatcccagtgataaatcccacttggtcatgattgatctttttaatgtattgttgaactcagtttgctagtattttgttaacgatttttgcatcagtgttcttcagggatattggcctgtagattttttgtttgttttgttttgttttgtttgatgtgactttgtctggttttggtattagggtatgctggcctcctggagtgactttggaagcattcccttctcctctcttttttggaatagtttgagtagaattggtattaattcttctttaaatgtttgataaaattcagcagtgaagccatggtgtcctgggcttttctttgctgggagactttttattacggctttgatttcattacttgttattgatctgttcaggctttggattagtgattcaatcttgacaggttgtatgtgtctaggaatttatttcttctagattttccaatttattggcatacagttgcccatagtagctgctaatgatcctttgagtatcagttataacatctcttttttcatctctgattttatttacttgagccttctttctttttttcttagtctggctaaaggtttgtcaattttgtttatcttttcaaaaaaccaactttttattttgtcgatcttttgtattgtttccttcatttcaatttcatttatttctgctgtgatctttattctttttttttctactaactttggctttagctcctgcttttttagttctctaagatgtatcattaggttgtttatttgaattttttctacttttttgctgtaggcacttataactataaattttcttcctagtactgcttttgccatatcccattagttttggtacattgtgtttccattataatttgtttccagaaatttttcaatttccctcttaatctcttcattggcacaatggtcattcaggagcattgtttaatttccaattaaacaattggaaattgtatagtttccaaaattcctcttcttattgatttctagggtttcttttttttgttttttgtttgtttgttttttgtttcttgagacagtctcactctgtcacccagactggagtgcagtggcatgatctcagctcactgcaacctccacctcttgggttcaagcaattctcatgcctcaaccacccaagtagctgggattacaggcgtgcaccaccacgcccggctattttttttttttttttccgtacagacaggatttcaccatgttagccaggctggtctcaaactcctggcctcaagtgctctgcctgcctcagccaaagtcctgggattacaggcatgaaaatagacacacttttgtgtatctattgtatgtttttagatttgaagttatcatatcttgcaaataatcttgtaaaccattattttaaactgacaacttaacactgattgcataaacaaacaaaaataaaactaataaaaactctacgctttaacataatcttcccactttttaactttttcttgtttatatcttattgtactgtctatatcttgaaaagttgttgtagttattattttcaattggttaatcttttcatctttctacttaagatatgagtagtttacataacacaactacagtactataataatcttgctaagttttgaagaattgacatcatgacaatgttgaattttccaaactatgaatgtggaacctctatatatttaggtattttaaatttatcttagcaatattttgtagttccagactacaggtcttttgtacatctttagtcaaatgtttttgtaggtatttaatagttttactgttattgtaagttatatttttaaaatttcatttttcagtagtttgttgcccatgtgtagaaataaatttttgtatattaaatttgtatccaacaatatttttaagctcaatattgaatctagaagtttatttatagagatttctcaaattttctatgttagacaatcatgccatctacaaataaatagagttttacttcttccattccaatttttacaaattttatttatttttcttgccttattgacctctctatgatgtcaaatagaagtgtaatagtggacatagttgtcttgtttccagcctcagaaagtgttaactatttcactgtttaatataatgttaactgcaggtgtttttgtaaatgtcatttttaggtgaaggaagtctccttatattgatagttcactgaaagttgttattatgaatgggtgtcagtttttatcaattttcttctgcatctcttgagattgtatatgtttttctgttttattctgttaatgcaacaagttacattgattttcaaagttgcattcttggaataagtcccacttggtcttaatgaattattcttgtaatttatcactgagctatattacctaatattttgtttacgacttttgtgtctatgttcacgagtgacattggcttataatttttctttcttgtaagtctttatctggtttggggctcagtttatgctggctcatgagatgatccagattaatgttaaatcgtgactctgtgcacattaactattctcagctgtgatttctgcaaatcagtagttcattatgaaaataacaaataaaatgttcgattcgactgggataagtgtagaaatctgtgggtctctatttgattccagattaatagagttttatttgtctttggtgttctgacagccatgaaaccaccaacccgttgcttctcctctttccccataagaatgtccttggaaatcacaaaatgttttgtttcccacatctatagatctgtccctatgtgggggaaagaaaagaatgagtaaacattacttctcagtgaacttgttcctaaggatcacttttttaaaaaatcttttttaaatgggagtaagctgttatctgcacaaagcccttggggtgaagtccagtcaacagggcttccctyaggagatgttctctaaactgtgttcatgaaagtgaataagagttagcaggcaaaggagaaagggggttggagagggatctagagtttcagagaaagagaaaaacagctcacgagaagkaccacaccctagagagatgacatggtcaagggtctaacggaataatgcgacatcatctcaacactatgtgccaaggactgtcctgaaagctgtgtcataaataaagttttggtgccgcaaaagaaatagcactcaaatataaaattttctttttaattctcagcaaggcaagttacttctatagaagggtgcgcccttacagatggagcaatggtgagcgcacacttggacaagggaggggaaggggttcttatccctgacgcacgtggcccctgctgttctgtcgttcccctattggctggggttagaccacacaggctaaactaattccgattggctaatttatgtgatggagtgatggctaatttagtgatggagtgggtggtttcgtgggaaaaatggctatgacagagcatgtaataggaatgagtcagggtggagcaggtgattggaatgagtcagggtggagcaggtaatcgaaaaaggttgctttatgaggaagttaagtttaaaagtagaaggcaaaaaattgaacatactgacatattgattctttgaaaagaaatttagaactcatatctaacagctataaatgtattaactgcattcatcattccgactgctcagtccaaaacccttggagtcatccttgactcctgtctttctctctcccacctcatatccaatccatcaggaaatcctgttggctctaccttcaaagcatgccaggctgatcatttctcccggtatctgtgtccagctccctggcctgagcctccacccccgctctctcctggccactgtgcttcctcctgacggcgctccctgcctccactctggctcctcacagttgattctcaacaccaaacagcgagattctttaaaacagaagtcagctcaagatatgtctctgttcaaaactctgctatgactacctgtgtcttgtggagtacaaatcctaccaagattctggaggccctccacacacaggcccccatgccctctctggcctgcctccatccctcccctccagccgcgccacatccttaagggtcctcacgcacatgatgcctttgctgtaatggttcccatgcccaccaaacccccagctccttcaaggctttgcactaatctcacctatgcaggagcccagtgccaactgaccaatttaataacacacctcgccccatcccactgtaccgtccagtgtatttctcatgcttattgtccaccttctcccactagaatgcaagctctgtgaggacacggagcttcattttgttcacagaggtatcctcagcacctaaatcatggcctagcacataccaggcactgaataaatatttgtgaagtgagtgaagcctcacaactatcctaagaggtcggtagcgttattatccccattttacagattgagaaactgtagagaggtcaaaccagagaggtcagctctcaaagtcacatggagccaatatttgaacccaggcatctgactctagaggcaatgttcttaaccactgcattatcctggcaagcccaaagtagcaaatgcaacccgagcttccagaaggccctgtgacttcagactatataagggattgggaagttaaggcactccttcaggctttgtgttcagaaaggggtggggaactggccagcacataccaggcctcataaaacaagttagggagtttgcaccaggatagggctagatttgtctttagaaagatcccactgactacagggtggagtacggatgggtgtgacaaggctgcgggcagggaaatcagttaggggctgagataatggtgacctcagccagggtggcagctgtggggatggaaagagttggccaaagagagatttaataattgtgactgacaggattgtagttgagagagagagaacwactcctaggtttggggtttgggttagttttggtttttcaagcttttttgactatgatctacagtaagaaacacattcacattttgatacagaatacacacacacacatacacacatacacacgcatacatgtacatacacacatacacacacatgcatacacacacacacatatcttgaacaagttcaataaccacagaatactttccctgacgttaaatgctcctctgtgtttcctaatcttgtctatctcttgtctctttctctcctttttttaaatgctggttgccactcatgacattgatttcatgactgatcatggcttgcagtctggaagcccttgaccagagagtgattggaggcttgggacacagctaggctgacagacaggagcctcgaaagctgtgtccctggacctcctttctgcagagtccccttcctgcatgacatacacagtctggctcccatcacacttaccagtctcgttactcattgaattagtccattttcacactgctgataaagacatacctgagactggcaatttacaaaagaaaggggtaatggactcacagttccacgtggctggggaggcctaccaaacatggcagaaggtgaaaggcacgcctcacatggcagcagacaagagaagaggacctgtgcagggaaactcccctttataaaaccatcagatcttgtaagacttattcactaccacgagaacaacataggaaagacgtgaccccaygattcaatttcctcccaccaggtccctcccaccacacgtgggaattgtgggagctacaattcaagatgagatgtgggtggggacacaaccaaaccatatcactcattcctttggggaaaatcctttgtctctttcaaggcatctctcagtaagtctcatcaatgaatatatgtggacaagcaggaggtgtggaggggtcatggaagctattgtttaataggcacagagtttcacttttgtaagatgcgaaaagttctgtggaggaatgctggtgatagtagcacaaccatgtgagtgtacttaataccaccaaactgtactcttaaaaattattaagatggggcacctgtagtcccagctacttgggaggctgagacaggagaatggagtgaacccaggaggcggagcttgcagtgatccaagatcgcaccattgcactccagcctgggcaacagagcgagactccatctcaaaaaaaaaaaaaaaaaaaaggttaagatggtggattttatgttacatgtattttgccacaattttttaaatcaatgtgtaggcaaactaatagaaaaaagagtgtctggagtggctttccagacatgaagtctcagggttgaaagagtccttggaaggcttttagaccaaacccctctgcatgctcaagccttgggtacaggatttctaagaagtggaacagtctccaggggtgtggagctcatcgctcaaggcaggttatcttatctgaataattttgtctgttgactattgggatagttctccttcagatgagctgaaattttctccatagcttcctctattaaacccaattccacttctcagggtcacaaaaaaaaaaacaaaacctaaattccctctcccatgcagtatgtattcaataaatatttattaggcatatgcctaagtaccactgtctgatcttccaaatcttctcttttccagttaaaaattccaaatctgacaactatttcttaaatgacatgattcaatgtccccttaccatctgactgctcttttgaaatcatcaatttcctcttattgtgggacatctataaacaaaaagaggccaggcacagtggctcatgcctgtaatcccagcactttgggagaccaaggtgggaggatctcttgaggctaggagttcaagaccagcctggtcaacatagtgagacaccatctctacaaaaaaacttcaaaattagctgacatggtggcatgtacctctagtcccagctactcaggagactgagagggtaggatcgcttgagtccagaagtttggggttccagtgagccacgatcacaccaatgcactaccgcctgggtgacagagcaagaccctgtttcaaaaaaaataaataaaatgttttcagaaataaaaacattacaataatcaatagccccaaatgatttcatcaaaaaatgggagattctaatggaatttccaggcccaagtgagcacagtgtcatggcatgctggtgagaaagatatgtgaaggccatgctgacatattgcaaggaggactacatttgtctttcaggtgcaagacaaaaaatagtgtaaattcacccttaagtcttaaggataggtacgagatccaatcagccttcactcttatctctaatttattctgtctcatcagaaccagaaaacatcacygcactttccttggaggtaagtgctttattccatgtagtgtgccacaggactgcatcttgccactacataaatacacataatatatgatttcctccttcaactctggaacctaaacaaatggattatgttccccaaattccataaagccataattctgttgagtggccatggcgctcccaaagaatttctttctaaatatagagaggtattcctctgcagaaaaaaatatcccagcatcttggttctaatatataattaactcctctctagatactttgcagttacgttttatggcttattttgagtgttcatattttatcagaaaattataattttcctctaaataggagtttttacaaggcttttgaattctgatgactggcttcatgtttcagctataattaaaacagtgaaatgaaatagcatcaccatgcatcacatgtggttctgagactgcttggtcccccaaccgcctgtctccccacaccccgcaacctgcaggctggggacactctgaccaatggtgggggctccagttttgaccacttagtgggacagctggttttagaaagaaacagaatggcctgagaagaagggatgaggagaccaaagtcctcacctcggagaagcctcccaaatatgtcccccaccgatgtcccaccttgccccattttccttccaggaaaatatactttctccaagaaatacactttccctccaggaaaattcactttccatctagttgttagcttatgagcttactctctgcttcccctctagactgccaactccatgagggccaatgcaaagtcttttttttttcttttgttttttttgagatgaagtttcattcttgtcccccaggctggagtgcagttgtgtgatctcggctcactgcaacctccgtctcccaggttcaagtgattcttctgcctcaacctctcaagtagctgggattacaggtgcctgccaccacgcctggctaatttttgtattttagtagagacggagtttcaccatgttggccaggctggtctcaaactcctgacctcaggtgatccacccgcctcagcctcccaaagtgctgagattacaggcgtgagccaccatgcctggccgcaaagtctttttcattcaacatggtatagacaacttcttgaaccccgtattagtttgctaggctactataccaaccaaccataggctgggggtttaaacaatagaaattgcttttcccacagtgctggagatcagaagcctgaagtcaaggtgtcagcagtgttggtttctccggaagcctctctctttggcttgtgcatggctgtcttctccctatatcctcacatggtcttccctttgtgtgtgtctgtgtcccaatctcctcttctaataagcacaccagtcatgttggattagggcccaccctaatgaccttattttaccttaattacctctttttttgagacggagtcttgctctgttgcctaggctggagtgcagtggcgcaatctcagctcactgcaacctccgcctcctgggtttgagcaattctccctgcctcagcctcccaagtagctgggattacaggcacccactaccacacctagctaatttttgtatttttagtagagagggcatttcgccatgttgaccaggctggtctcgaactcctgacctcaggtgatccacccaccttggcctcccagcgtgctgggattataggcgtgagccaccactctcagccttaattacctcttcaaagaccttatctccaaatacagccatccctcagtagctcgtgggataggttccgggacccacccttgctcaggacaccaaaatttgtggatgcttaagtttctgacataaaatggcatagtatttgcatataacctatgtacatccttctgtatgctttaaatcagctctggattacttataatacctcatacaatgcctacacatcactttatgtacatggattcaatgtagttctctggacagagcaaattcaagttttgctttttggaacttggtggaattttttctgaatatttttgattcagaattggttgaatccacagatgcagaacgcccagatatagaaggctgactgcacagtcacattccgaggttcttggggtcaggatttaaacatatgaagtttggggtggggggccgaattcatcccataacacagtattaggctatcaaccactgtttgctgactgagaaaaaaatgaatgaccaatagaacacagaaacattatggcaggcatgctccyggaagcagttctcctrgcacacgcttctgaaggcctttcctttttcccccttccctctccctccacccatacaagggtccagacgagtgagtcttctgtcaacttcgggtccaacctaaccaatccagtcacacaaaaccctgtgccatgaacttcagacatgatactaattcccaggaaagactaggccatctccaggaagccttccttgtttgtcttcagggaacccctgctcagtagggggactgcagaacacacagaagccattgagttgtctctatgatgatgaccacatcgcagcagggtacagctgagccaccagagcttgcccatctgctccctctgggccccgccatgattctttctatcactgcctgtaagcctttatagtcttcctctctctccttgcaagagaaacctcctaacttgttggccactgatggactttaaccagggtgtttgtcatggacctgtattgccaccaaggtggctttggctccctgagtcctgaccctctgcttrttacttcccaacaggcgtcgggtttggagttcaagtcrgtagccgacagcgttctgtttttacgtgacaaaagatgggaagaggtcagaggtgccctgatgtctgctttcagtcctgaaaagctgaacgaggtaagacatgagaaatgcaaactctcttctcttacggagcaggtttcttctctccaaatcgtgatgagagccagttcatgttgcatcacttgcccaggtgacacatcaaaatgcctttcccactgggaccttcagacctctctgttatgcagaaagcacgggactctgtgttgagcgtctttcgtctctccagcctcccatatccccacttgccataaatgaactgtgagtcaacaagtacacagggcattcgcctgtgtccagagacagagcttgaggtgctttgggggccccaggagacaactgcaacagtgtctgttggactgtcatgcataatggatcacctagggatctggctacaaagcaggctctgattcaagagggccagggtggcctaagaatctgcatttataacacccggccaggtaatttcgttgttactggacaatgaaccacactttacatagcaagaaactagagaacagcatgaaacaaaggtgacctaccaatcaagtcttaaatagggaggtgattgcagtgaatgactggggaggagtgggcgatcatgtcaggcagggacacccaggttaacctctaggccaagttcaagggaagggcaggctccacaggatgctaccagctctctaaggccctggacactctcctttccctactgagtgactcactctttcctatcagctgtgcacccaaaaccgggtgtttgtacagcctccagaccaatttctcacacaacagatcctgactgctgtgttttgtatctaagcctgacagccccctcaattgctggtctggctttggtgtttgctgttctgaattgtgcaaccacaagggagagagaacttgagcccttatgatgtgaaggggctaaggggcttctttagttccagtctcaggtacacaggcatctctagagcaagggagcttccaaagcttggcttgagtgccctgggcttctgccatccaccctgtctggatgttccagagtagcctgtcttcagttcaataaaaatgaaagctacttttagcttaagctcaagatgctcatccatatggtcctgattgaattcctataaatcttctgaagtcccccagaagaggagggggttccacacctcattatatccaattaaactcactcagaagctagtgatccccccatttttatgaggttttgatttgcatttccatgggtagctgttggtgtttgggggcagagcctgtctctgtatgcagcacctgctcacactcacacagctcagagtcaggtaccaagggttgcctgtttagactaacayactgcctcttcaccacattcctgcgagataaataccatcatccttattattaccatcccattttacagaggaggaaactaggcacggagagattaagtagcgtgctccaagtctcatagctagtaagcagcagagccaaaatcagaatccagctccggagcgctcttcacctctctgcctgactgcttgctacctccatgtgattttccagtggtgctcggaggccacgtaggactgtgccaggggctgtctggaggatgcaggaaggggaagtgtagcaaatggggcctcggtggaaagctrgggggygggggagggtcagaagcaaaacttctctattttctgcctaagtttggaaccaactgaggtatggaaagaggttttaggcaaaggaaataaaattttctcttatcttactggtaaagctgtttgaaaaatagagtccccatctgatcacatgggcttgctatgctaatacttcacccagaatgggacaattgcaggggggtggcagatgccatcggggctggcccgcggcccacatgtgctcarttccttcctccaagactgggtctgatacagtgtagacagcaggagatggagagtgacttagatgcagcggttggccagtggggcccaccgggatcacttggggggctttgaaaactgttgctgcctgggtcccacacctagaaattctcattcgcttggtttgctttgggatgcagcctgggtttgaggatatttttttcaggctccccaggtgattgtcacgtaaagccagtattgggaaccaccaccagtagaagttccccacaaggacatgagaggaaaggggcacctgcttccactgcaacaattagccctgctcacattgatctctgttatctattgaggattcacaggagaatgtgaaggaagggcctgcatcttaaagctagaaaccactgctctaaaccatgtagactagctgcctggagtgtgcccctttatcacatccagccactaaaaggttgagtcagccaagagaagaccgggggaagagaggagaggtaggtgagcctagggctggcatcactagcgtatatgtctgtattcaaaagcaatggcttcatggcactatagaagtagaaagaacctcatgtgtgaaaaagaaattggtaaagagtatctgagaaaagaagaaaagagaaagaagaaaaggaagcaaggaaaggaaaataaggtttagcagtcctgggctatgattctttgataaggaattttatcatggtctagattcctttaaccccttacaggggatactccagaaagtgacacattgtcgtttcccaagcaaatccagtgctcctggagtccagtcttctccctctagtccagaaatcaaatgcatagtgcctgaattaattgcagaaaatagagttcctcaatatgtccacggcattaagatgccaagagaagccaggcaaggtggctcacgcctgtaatcccagcactttgggaggccgaagcgggtggatcacctgaggtcaggagttcaagaccagcttgatcaacatggtgaaaccctgtctctactaagaatacaaaaagtagccagtgtggtggcaggcacctgtaaccccagctactcaggaccctgaggcaggagaatcgcttgaatccaggaggcagaggttgcagtaagccaagatcataccactgcactctagccttggtgacagagtaagactccagactccatctcaaaaaaaaaaaaaaaaaaaaaaagccaagaggtagagagagatttcatagagcccattatttaccatacactatcaataaccttgaaattcccttgaaaggcatttttttctactccatatagttcaatttaggttcttgggtttgcgtttgaaaggattccatcccagaggcaggagaagttaactttttccccacctctggggattttagacctggcgagttgaagtttactggaaggcccctaaggagacccttcaagaagaagttggctgtgcagatggcactcaggtgggagggggaagaaagatggtcttcaaaacacagagacgtgtagcatatgtgttagatatggttctggggagaaccatatttaagggaggagcggaggagaaacctataaagaagactcaggaagaacagcctgaaatggaaaccagcagaatgtggaaggggaaagcatttcaaagaggaaggagcagccagaggtgttaaatgctgctcacatggaaagaaacacgaggacgaaaaagtgcacagcaaagataatatttctgaaacgtgaaaccaatgtatgtctgtttcatgctccatagatcgtgttccctgtaattttcccgcacccgcggaatcaatggcaccagtgggtgctcctgaaggtgcctctgaggaagacagtaggtgccatccagaacaaggaagtagttgcttgattttgaactgtacgttagcaagctttattaggagaggaaagagttttcctaattccaaaagcagctcccctttgcatatgaagagcagagggtttgaggctctaagccatggtgtagacaggatgcaggaaatgacagggrggctgcttctgggctgtggaagatgggtggaggggacaaaatgagaagtgtcctatattcctccccaaaacctcctggtttctggatgcttcctcaaactttaatctcccagctgcctttgttctctaagtcactggttctcaaaccttgtgggaccaagggctgcatgagaatcacctaggacccttgttaaaaatacataatttcagccacctcaagatctatatagtcagaatttctaagggtaactgagaattcgcatgtcacgagttccctggaaagattctgctgagagccagcgtggaaagccccggcacagtgagtgttcctgttggtccyctctctgaccacctcagacygactacatctccaggctcgaaggacctggcccctgaacccccaccctccactgctttatttttctctgtggaactatcaccagctaacattccattttgtttacctgtttattgtatgtccccttctgctagatggatgcttcaggaggacaaagtctttttgcttttttcttattttctttattgttaactgcacacactaggtacataatagacattcaggaacaattaatgaatggatgtatgaagaatcaaagaaccgagaagctttctacctattctgcctaaggatacatgatgaaactaagctaaaaaaatgaaagggaaataattctatcaagaaaaaattaaataagaggatacagcaaactggcttttcctttagagagtcaccaatatatacacatatacgtatacacatacaaaaagtcacagacacaaagagggaaatgagccacagtgttaggagatagctcagagactctgagccacagatactcggctgtgggtacctgagtcagttttcctggaaatagctttgaaataccagcatctctagtcctttctgaatttgtaagtagtctttggacttttgttatcaaacatcagagtttattcttgaaataaaagtttgtttccccttggaattctgaggctttctcctttagaaccttggcagcctaagtccctctctacctgtgtctttaagtatggtcaatattcaaaagctttggatggcgttgtcttcgtttatgcggatattaggttgcctcagtcaacaatgcttgaaaatggctttaaaatgagcatcatatcatgaagccatatttgtatttaaattaaaattgtttttttttttggyctatgtcataccagggataatatagagcaacagagaaccagggaaaatgtgattcatgcatctccaagtcaggaaaaagagactattggaatcatagccagcgacaaacaagttattgggatttatagaaaaggatggctgagcattcctggaaaaacaactgactttttgttgttgttgctgttgttagggaagattttgtctgcttaactggccagagttttcactccatcccccgaagaattgacgttttaaaaagcacaactgtagatttagattttcacagtcttttgctagattctttaccaaagactattagtgagtagtaaccctgggattgtrtaaaactttattaaggatgagggaataaataggtttaatttcaggaaataaaactggggctaaattagtacttctctgacggaaaatgtataaataatgtgatcccctggggacccaggttagcactagatttatttttaaattttataactcatctgaaagagagagaacayagtggaatctatatatttgtatattcctctaagctgttctgatttgaaagatattaaatcaataggaataactttctgagactcttgtaagattgcataagtcagcacaaaagtggcaggtaaccttcagtgtaagcaagaataaaagaatacatttaggagaaaggcatctaaactgtacttatatgatgatgaatttcaagctatgaattactaccagggaaaaggatttgaaatatggaggaccgaaaaggccccatagtcaaataatttggtgaaatattacaaactatattcttcaagattcaccatgtacctgagcatatgaarggcttgagaaaggcctgcagtaaagaaacctgcttaactttgtttattctgggctcaaataggttttcaaaaggagagaacgtgggttgttaacttcctggttggctactgagagaaatgagtctcttgagcaattatcctttgcaggtagcttccatgaagaacccagtttttgagtgcctctagcagagamtaagcttcaaacctcattaaccatggatccaatccaatatggcagcttgtatgttctccattctcaaagcccaatataaatgatgggctttcttcattcacccagataactaagagctgatggtaccccattgagcagatatgggagacaatgaatcttcatagatgagtgcctaaggatatatgtgtcactcaagagtaaatgaaccaatcatgttgctatgcatagggactcagttaaagaaaagtcagataaaatgggaggctggtatctcgcacagcactgatccggctctctgcctaatttttcacttttcatccagatgttccccgtcaagaaggcacagtcaataatgtatgaatcttaaaggcagaggcagatgtggttattactccctgtaggcatttcctgacttggagacgacatgttactcgagaatgactacaatttttaaaaatttaagttgatatagcccgcttatgagtaaatgcatttcagtgcaaaagtcttttcagaattacagtcatcatcacagtttagtttggcctttaaattttcactgtaaactctccagatggtcacatatgggggcttctaaggcagaacacgcttcccaataacattagagcaagcagccttctctaggaggcatccatttccagcagtctatttttaatatttgcttttatttcttaatcctcctgaacaataaaaatgaacgtcattataaccaagtgtggctgtagtcatcaatacttcagagtccaaaaatacattggccttgcctgaccagttgcccattttctggaatagctgggtatttatctagcagygagagaccattatcctgagacacagtcgtgttccaccgacacctgatctactaattaaaatcactatcatgatggactgtttaaattctggtttaaatgttccttttgcatttgcatttaaaagaaaacacactcctcatcatgggcaccccagcctgggttataatttggctttcctttgccagaattataatgtcactctgacttgccgctggttaaatctaaaagagcatctaaatgtgcctcacagcttggctgttgcttggcaacgccagcagccacctcctcattggggtgacttctaattggtcacaagtcttgacaggagccactgacttattagaaatgacacttgattattcacctagatggctagagctgatacttagcagcaggaaattttgcataaaaaggagtcgtggatgtttttaatatctgggtggcttttagcgatggtgtagtggaagaaggaagtgataagtttcattagtggaaattaatttttcatttgttggtcaccagtttagagcactttaaggcattaattttttcattttwaaaaaaaacccagaaatacgtttaaataccttcccccacccccagcagctgacccttacttattcagaaaaccctcctctgacatcagccccaaaatattgcccccaggtccaccaagggccaaatcagatgaaatgttcaatttataaaggtcaacaaatatttattaattagttcctgttgttaaggagtttataatgtagaagagaaacamggtacataaatcactgcattattaccaatcgtggaaggtggtgacagagctggggtcctgctttgagcatcagaagccactttggcagggaggaagcagtgagtagcaccggaattgagctctgaagattttgctgttttgacagagggagaaggtgcattgcaggtggaatgagctgcaggaatcaaggcatctggacagaaaagtacagggtatgttcagggaataggggagtacaaattggctggaacacagagtacatgtaagggattagtgagaaagaaagctgaaaaagtaggttgaggcacgtacagttcactgttctgtgccgagagagtgtttggtgcacacttcactagagctcgaggagctattaaatacttgaaagtgagggagtgacctgctcagaactctgtgttaggaaaaagggtttcatttcagctgtttagcccccaagccagccatttcccagacccatggggcaaatctttctggtgcagatgaggggaactgtgaattgtctggaggagtctcctctttgtagtagccccaagtatgggcaggctcccaggggccatgttatgacatcaaggcagcggtgtccactgtggctcttttgagtccctcttcgtgtgtggatcaacaagtcacccaagctacacaccatcaacgtttggggcttatctctgtttagatggatagggttatgyaaaaaagaccctctccttccctctctctgtgtargaaatatgttttccctagcactcagcattgtccaaactttcargaactccaaaggcttaaagatggtgggttttttctttctcaagtttatgacataagatctgcacagaatgacctagaagtgaataaactaaggagcaaaggaaatgtggaggctgagttttgtgggaaagcaacaagccaggagtcaggatatctggggttccaattctcatttgaacacaaaaataaccagattctgccctttaggtccctatgtattctgaagttgatgtgtcaaagaaatgacaaaaggctttcttgggaatgggatgtgttgctgaaagcacatggaccaatgatctgacacttccctgcactgagctaagaatttggctgctctctccatggcttcaagcaactgtctcaacctgatgctttgtgacctccttggaatcttcaaatgtcagtggaaagggacattatagctcattgcgatcagcccttcatttagggatgaggacccacgttcagagagattcaaatgccaggtccaaagtaacacataggaccagcatgagtctcagctttcttcttcagagccagttttcagcaaaccacactgtattcatgctaagagacagtgcctcaatctgttcatgtttcttgggtaccttctatgtcaaggctctcaaggaacatttgatcaatcagtcatcacacaggtatttctagaaaatcaacagaatggggtgtgctatgctcattcttgatataacaaataccaaaaacttcattaatccatgacaacatgcaatagttaccacaaaagagcaatattgagagtgtattagttatctattgctgtgtaacaaaattaccccaaaacttagtggcttaaaacaaacttttgttagctcattgtttctgtgggtcaggaatcctggcatggcttagctgagtgcaaaggctgagtccagagggactgagggctgaggccagagggatcarggtgtcttggagtagtagtcaaatggctggcctgatctgtggtctcatctgaaggcttgactgggggaagatctgcttctaagcctcatcacacggttattagcaggattcaattcgtaatggactttggaagataagaatcttgtactgtgtccttcagtcagtggggatctacaaatgtttcagcaaagcattactgaaataacaagtatttttggaagatctggccaggcatggtggctcatgcctgtaatccmagaacttcaagaggccaaggtgggaggatcgtttgaacccaggagttcaagaycaacttgggcaacatagggagaccccgtttctacaaaacattaaaaaaattagccagctgtggttgtgtgtgtctgtagtcccagatattaatacttgaggggctgaaatgggaggatggtttgagcccaggagggcaaggatgcagtgagctgtaatcatgccactgcactccagcctgggtgacagaatgagatcctgtctcaaaagaaaagaaaagaggccaggaagctctttcaaagaactttctttagtacacctgggtgtcaggcactrtcaaagtcctaagactacaaagatgcttaggctatagtcttttttctcaagaaggaagatgacaaccatattccaggtgacaagtagcaacacctgaactaggaggtgactgaggagataaatatgaaagaacagatgaaagaaaggaagcaatgttaacatgatgaggcaagaacagatggctccaatggggagttgtccctgaggaacaagaaaagagaagagaatgattccagtagtccaaaccagcctgggaggayggatccctccagaggacaactaccatgtttacaccactccctgcyttctgtgccaagtgttttgcatattttgtttctaatctttgtcacgactcttcaagggaggtattattttcatttttgcagatgaggaactagactcagtgaggttaggcaatgtacccaagatcacacagctataaagtgccaggggaaggaaacctactaatttgcagtgcctttgagtatttgctatgcttggggcaagtattctccaacaaggtcggaatcttacactcaaggaaggaaactcagtgatgagattctgtgagtcacccaaaaggagaggagaagaagacctttgagcagaagctctcagcccttcttggtcgttactctctttgcccactcatcaggccctccctccttttagaattcactctgttgccctctgtctgcaccttgactcaaaatttcacagacacagttggtagaaaatccattaaaaaaaaaactggtgcccatcaatgacagactggataaagaaaatgtggtacatatatggcatggaatactatgcagccataaaaagggactagattatgtcctttgcagggacatggatggagctggaggccattatcctcagctaactaacacaggaacagaaaaccgaacaccacatgttctcacttacaagtgggagctgaacaatgagaacacatgcgcataaggaggagaacaacacacactgaggcctgttgggggaggggggaggaagagcatcaggataaatagctaatgcytaatacctaggtgatgggttgataggtgcggcaaaccaccatggcatatatttacctatgtaacaaacctgcatgtcctgcacatgtatcccaaaacttaaaataaaataaaattttaaaaaactgggtactttaattacataagaatctccaggttatgcagaaccttccttccttggggaatttgcttcccagggtggggatggtgatttcccctgaatggttaccactggttgccagacagctgctcagcctcacactcggcatcacctgtgtagggacaaccaatgtgagaggcgagaggaacaaaatgggaaactttctcccctagcttggctactgcactgcaaccccggtcttagcttgggctgtcataaccaaacaccattgagtgtgtggcttaaacaacagactttttttttttttgagatggagtcttgctctgtcacccaggctggagtgcagtggcgtgatcttggctcactgcaacctccacctcccaagttcaagtgattctctggcctcagcctcccgagtagctgggattgctggcacgggccaccacacctggctaatttttgtatttttagtagagagggggtttcaccatgttgaccaggctagtcttraactcctgacatcaagtgatccacctgccttggcctcccaaagtgctgagattacaggagtgagccactgtgccaggcccagacatgtattttctcacagttttggaggctgggtgccagcgttgttggtttccagggaggcctctctttctggtttgtgggtagccgccatcttgctctgtgcccacaagacctgttctttgtgcatgagagagagagagagggagagagaataagcatgagtgctctggtgtctcttcttataaggacaccaatcctattggatcagggccccatccttgtgactttaaccttaattacttccttagaagccctatctccaaatacagctacactgggagttggggcttcaatgtatgaattttgaggcaacccaaacattcagtctataagaactcccaataaatcactttttttaaacctaataacattaatattttatctgattataagtgtaatacatgtgcattgtgaaaaatttggaataaaacaaaaaataaaaattactcattatcccatgaagaagatgaaatgtaacaaccgaatgcatcttttagtaagatctgagtgagaatagcattgtgtattcatctgtgcatgtgtgtgtgtgtgcacatgccacgtttgcctgcttgttcaaaaatctaggagaagaactgcggggtttgtggattgtataaagattatgcaagcccatcaaagacagcttttgtttgtatgcaactcatgtaaaagtaaatattccgtaactgctgtgtaaaatgcaaggaagaaaacctgaaatgatggctattggccaacatacagattatgctcggctgtcttataatattttctctgcattgctttttaaaacatttttcatattacatgccccatctcatatcacattaacccaaataaaaatgtcattatccattcagttcgacagacagcaagcagagtatcgcagaaaattacaatcacgtcaggcagcaacaaaggattctagtcaaargcacgtagaagacccgatggtgggcagctggcctgggctytctttcacactgtccaggaatatgtttggattcagaatgggtggccccctctttatacacagggcatgcctctgaagagttgtgtgtaaatcacattttatgttccatctcttttgttatgttaagaaagcttcaagctagatatctaaaaagacttcctttcaaacagtacatatatatatgtagatagatagacagattttcttttaccatgttactattcctctgaagtaaatttaaaaggtatttaggtttatgggattttatkaaactaggattcagttgtaccactaaacttattaagataatcgaaggaagatagccagtaaagctagttataaaaatgtggcttagactgtactgacttttccaatgttaagggtagactgagacttcttggaagttggggcctagagaccattttaagtgacccattggcacacccttttgtactgatggattattaaatcgatggtttgtgagaatttagaaaagcatacagtagtcatgaagcatcaacacagagatactaagaataaatcaggatagtcatacttatttttcttttttgagtggacttccagataggtagatgaggtaaatcacatttctgtttctrcaaatcatttgacaaagtcttccccagctgactcatcagtaaagcggtgcctggctgagtatttacttaggttcatgcacagatagcccaagatccaaaaacagtgatgatgaatgattctgcggctacctaaacyagctgtccagtggaggggcacaaggctctgcaccagggcctgcctacagaccaatgaactgaagggaggcttagaaggcacacttactacattgcagatagaacgaagaaagaatagcccagtgttgcaggtgatgggatttttttttttttttttttttgagacggagtctctctctgtcattccagcgatgcattcttggctcactgcaacctccacctcccaggttcaagcgattctcctgcctcagcctccgagtagctgggattacaggtgcctgccaccacgcccagctaatttttatatttttagtagagagggggttcactctgctggcccgccaggctggttttgaactcctgacttcaagtgatccgcctgccttggcctccgaaagtgctgggattatagacctgagccaccacgcctggccaggtaatgggattttaatgagtgagtacatcttttgctcccccacagtgttcaaacaccccagtgctctaagccctgtggctttatgaacagcaaatctattttcccaagatggctctccctccatgagccttggcaacagggcactcatgagtctcagatgctctgctatctctccacttgggtgtgttatgctgtgaacattctgctccttgagctgttgttcagccgtccatagcgctgtccaggccattgtccctgccttggttaccacctccacgtggcagccttcatggagccattgcagctttgatctacaggactccctcgccctccatctacgggaccccctcgccctccatctacgggaccccctcgccctccatctacgggacccactccttcagcagaggagttgggcccctggtaacacaattctttccttacacccagagcacgtgggactgactcggaggaaactgcagaggagaggggtcctataaaatttcatgtcctcccaacatcctgtcaatagccggccagctgtcccactctaccaggtgtctccaaccaactgaatattccagagaagataagagatcgttctgctcagaacacacggcaggacaactagtgcctttctaatgaatggtccctaaaaaaatcgaaatagcaattgtacctggttatcatccatggaaaaagacctcgtggttttcattaacctgaacctcaatatttgcctgcactgtttgtcttctagaaaagtcaacataaaactggctttgcgattgacgtgtagggtacagatctcaggaagtgattcatttaccatacaccaatccacacctgaaatactgtattccacttatgaggccacctttaggagtgaccctgataaagatgagagcaataaggcaggaggggtgtatgcaagccatatggttcagtcccccattgaaaggatgggggcagccaggcacagtagttcacgcctgtaatcccagcactttgggaggccaaagtgggtggatcacgaggtcaggagttctagatcagcctgatcaacatggtggaatcccgcctctactaaaaaaaaaaaaaaaaaaaaaaaaaaattagccaggcatggtggcacacacctgtaatcccagctacttgggaggctgaagcaggagaatcacttgaacctgggaggcagaggttgcagtgagccgagatcacaccactgcactccagcctgggcaacaaagcaagactctgtctaaaaacaaaaaaaaagaaagaaagaaagaagaaggaaagaaagaggaaagaaagaaggaaggaaggaaggaargaaggaaggaaggaaggaaagaaagagaaggaaggaaagaaggaaggaaggaaggaaagaaagagaaagaaagagagaaagaaagagagaaagaaggaaagaaagaaaagaaagaaagaaagaaagaaagaaagaaagaaagaaagaaagaaagaaagaaagaaagaaaaagaaaggaaggaaggagggaaggaaggaaggatgggaacagttgtctaggagaagatggggagcagataggtacttgctgtctgagtgtcgggtgcactgtcatgaagaagagaacagaaatgaaaccagcaaaagattgttagacgaagtcagattttgcctcagtacaacaacataccttctgagaagcagattaactttataacttttcccagtgcctcaagactttaagaggaaagagtgggtattacataatcagtacgatgccatgattcgttcattcacttaacaaataattactatgagccaggcgctgttctaggtgctgggtttataaaaatgaagaaacagactaagatctctctgacctcgagaactcaatattctagtgtgaaaatcatcaaatctaaacataggttacattttatgtctttcatgagaaatgctcagaatgatgtattagagcacgttgctttagctgtgatgctattctagaatgggcagcgaataaaatgattctgctcgatattttcagcttggccttttaatcatgcaagagagaataaaaggtcacatgggtggccagcaggctccacaaagaattccacccacccgtttgtcgaagccgagtggtatctatgtgaatctccattatgccactctacctttctgtgtaagttaggaattttctaacataaaagtattttcctattaaaaaaaagaaacccaacaattgccccatgtgggcataggaggcatcttgaagtcaaggttttcccagtattcgaaagcttagcggcttaagcacaaaagaataaccatccatcaggaatgctctataaataatttctgtgttaaataagaagttgaaatggatgaccttaggttcctttggatactaagattcaatattctagtgaaagatctaaaatacaatcggaatacacaagcatagacttgggttaattccagggattgtgcatatggattaggctttatttactygctaatgctaaccaaatgtcatgaaactgagtactgattctcagttttgtctaagcacttaatgatcattttcataattatttcaccgtattcactgtaaatctgttcttcttttttgcttccaaagataaaaaatgcttaagctaaaatagacgtttagagctattgtattttatgaatatttgtgaattttaggatcttcttcttgaatcttagctgtgtgaaaaatatcttccaaacagtgttcattttcccagamagcactacatataacctcttcatctgcagccaatttaggtgtactcccggcatggtgccctaattacacctttgttatccattatcagatggttcccctcatcagccaagcctgcgamcttmtcctggctcatttaaaacgctatgcggaatctggggacgcatttgacatccagaggtaaggctgctgcattacagatgagaaatcgagtttttgaatcactgcttcttgtaactgtccataattgctgacaattaccttgggactagcaaactgtggaaacgctagaagctcataaaagcatggatggactgattaataaaaagaaaagaaacccacttaacatgggaaagagatgtgagcagagccagggtacgtgcgtcctgtcgaacctgtggatggatccaccctctgacctccacagacccaggaatgggcaggacaggcctgcgcctaaggacagggatggggggaaagttcaagcattttcacttcaagaaaaattgtggtgcacctcagcccagaagctataayttagtggtggacaccaaatttaaataactgattatctggcttttcgtcattttgtaactaaaaggtttttgctttaaaaaaacatctttagtctaagtttgtccgacccacagcccgctggccacaagcagcccaggatggcattgaatgtggcccaacacaaatttataaactttcttaaaacattgtgagtttttttgcagtttttttttttctcatcagctatcgttagtgttactgtattttatgtgtggccaagacaattctcctgcttccaacgtggcccaggcaagccaaaagatttagccacctttgctttagtcattttatgccaaatcatggcttacagcagataaagaataaagtgggatggtgaatcatccagaaatttattcattattatcattgctaataaaataataacataatcatcaccaacactggtattgcaccagtttacacagtcttttcatccacattgtctctgattattataggatgcatgagttggctaaagataaggtggcctcatcagctataaaagcaaagtaaataaccctcaagacccttaaatcttcaaccttcaggatcagatgaaatcacattcagtagtctcattcttgttttcactctagcagggaaaygtgtaatcagttgtagaaacgttttcaataaaagcagtgtgaattttaaaagtcatctggaaacgtcatgtattccttaatgataagttagtggttatagaattcatgtacaaaaggagttaagtgtgtgcctacattgagaacaaaaattggccttttaattataaaaagatattaataacccagtttttagctttttggaaaagaacttaatctgactactcctataagataacaaaaagaatcatttgagtttaaaatggccttttgagggsgcagctttcctatagcctaagaggttaaattttctggagctcctgccagacacttttccttctgtttgtttctaaagcacaatgtatgttttctgtaataatatacagatgttcatgaagcctgccttaaagtttgtcttgtgtttatttgagtgctaagagcccttgctttttgttcrttgctattaagaaaactgtaaaatcattaagaggaagagggagacaaagttaataaaactagataattaggttgttaattcatcaaggacaatttgatgtctatcagtcaatcattagattctggcctgagctgggctgtgcagagctttgggtacagcatgtaggcgttgggtcacctgtgtgccctccttcccagggaggaaactataaagtgtccttcttagtacctggctgtgttctggttgaccacagctgcctgaggctcgaaggtggaagaggctgtgccctcctctcctcccaggtctttgtttagacgccaggtcttcgtgtctcctcccaccctctgccgtcactgctcagagtgccccatccaggagcccatctccctccacctccccccagatctgcagaagctcctcttccagacacatctgcagggctgggcaagccagtgtaagcaattcaggccctcctcctctggagggggccattgtgggtagcccctgccagagtcctttcagatctctgtgctcccatctcccgtaggtgctactgcaattacaccacagatgtggttgccagcgtcgcstttggcaccccggtggactcctggcaggcccctgaggatccctttgtgaaacactgcaagcgtttcttcgaattctgcatccccagacctatcctggttttactctgtaagtgcggctgcagcccggggcgctgcgatgactccagcaagttgggcagaccccatgacacctggggtggcttctggggctctgtccctgccactgggaaagggcactcgggttgttcccctgcagaggctttgtcttatggagccaccgggttcctcttgtcacccgcctagggccacttattagcaatgctgtagccctggcattggtaataagtggccccaccgccatggtgagaacggttgggacgcaccgtgttaggcacggggtgtgcgttgcctcacttagtcctagtactcaccctatgagaaaaatattcttgtccctatttctcaggtgtgaaacaggcctagaaaggccgagctgagactggaacccaaagcctttcatttcctagggcatatttctttccttcagcaaaatcctcttcacaagacttctccacttgaagcccaacacacagaaatcctgtgtggtggatgaggattaggtcacccaatgcacgaggaccagtctatttattttattttatttattattattattatttttttagatggagtttcgctgttgttgtccaggctggagtgcaatggcacgatctcggctcaccgcaacctccgcctcctgggttcaagcgattctcctgcctcagcctcctgagtagctgggattacaggcatgcaccatcacgaccagctaattttgtatttttagtagagaaggggtttctccatgtcggtcaggctggtctcaaactcccgacctcaggtgatccacccaccttggcctcccaaagtgctgggattacaagcgtgagccaccacaccaggacttattttatttttattgtagaagtgagattttgccctctggccaattctagtatcttcttgcttttataggagcattgacgtgttgttatgcttggtattgattattgccatgatttctaaccattctgctgggctggtaaattccattcattccttgaccagtttcattcccgtttctgagccgatgtccatgggagcccgtcacctcactggctccgccctgaaatcgtaggcagagtcactctgagtgtccagcagtctcttcctgcaccctttccaccgatcttggaggcagcgcaggctgtgtctgccccttgtgcctcaaccacggcccaggcctgtggggcaggtggctcagttgtgtcatcccttctatttctcctctctgcctctgcagggccctcctgctgctgtgtcacattggttcggactctggctcttgaaaatgggcctgcgcattctgagagcatgtgtgtctggagatgttctccccagcccagctcccatagagcccggtrcagggtgaacccacaatggaagctgagaagctgaacccagccagtgcccctctccaggggagatgaggggttcctgactctggcagcccgatccccagcacatggcagcaagggcccatgctgcacccaggggccggcaagggaggcacccacagcagcaacagccagtacccttgtcagcagctgcagtggcagctcttgggagcaattcaggaggtcatgctgggaacaattatccactggaaagaaaattcaaatgaccagaaagtttgtaaaaagtaaatcagcttctaccacttgctaaggcttgaaacagcctgtaatcctttctctcttaatgaagtacaaagaccttcaggtctcatccccaggacctgaaacattaatttatgagggtgaccttgacctcttgagggccagatggaagtgcagactcgattaattgcacagatgtttaytgagtgcttactatgtgccaggaatggtgaggagtaccgagagggagtgagacatcacccctgctctcagaagcagcagtgcggcggggagggcaggactccaaaamggctccgattccaggcccgcgtttgcttcccgggaacaggcgtctaatggccctggtttattatcacccccttttcaatgccacttttgtttttctctttcaagtatcatttccatccataatggtcccactggcccggattttgcccaataagaaccgagacgaactgaatggcttttttaacraactcattrggaatgtgattgccttgcgggaccagcaagctgccgaagaggtaacgtattttaataggacacagccttgaaatggaatggagccgactttggcatcactgtctctgctctttctcttccctctcagccccgcacatcacaccgtgccgtccttcagcaacccaccacttacagcttccagggacagtggagagaacagaggaaggttgaggaaggtcagacaagaaagggagggtgggacggcagagagaagcctacagcaatgtgtacatcctcggacacggacgggtagaattaaagccgcccccaaaactgtctccctagtgcaagcatcaacccaagcacaggttagaatagcccagaagaattttctgggtaagtgtgcccacatgcaattttcatgagcatattctttatattgaaaacccagcaagatggagttctccagcatgaacagcatgcttattagagagttcggcaactgtcagtcactaaccccacactcccactcagcatggaggatgtcgctacagaactcgtggttgagggccccctggactccttggcacgattcatatgagacgtagcattttctttcctccttgcagatttgcactatgcttggcacatagtaggaatcaagtaaatatttgttgattgaacttggctaaaatagaaagaggagttttcagtgggaagaaaggtcatttcaatactggatatgcatatgcatatgtaaatctgggctttaaagcccttgtcacattaaagaaagttactaaaaaggaaaacagggctgaaatggcctttccttagctggctcgtgcaagatgcaactttaaaagggttgtctcaaagactggatggctcagaggaattggtgagggccaattgttaaggcactggcctgaaatgaaatcaggggtcaattagtggcttgatacaccgagcggccttgggcagcagccgcgtcctgtgcagcttcacgcccggagaactgtgcagcaaacgtgtctagatccagaaggcatgggaaggtgtaggcaagcttgcagccccytcggcccacaccactgtgaactcaactcgcatgtccttggaggtgcgggaagaagcagctaactggcatccctgccccagctctgaagcctaaaaggacagaacattctgatccaggttcatgtttctccgcagagtgaggctggagccagggggagaagggataaagaaagaaccattttcaaccctcaacattgctactaagggccaccttttgagagtgttcacacacacacacacacacacacacacgcatccctagcctggctgtggaatcaggctaaaaattttaaaactgttgcatcgaatgacttactaagaggtgagaggttattaaagatccaattactgggattgcctagagcttttccttttataaactctagtgctatttgtttcaaacaatgagttgatctgagaaaaatctcccaaccacaaatccaggacagccatgtcaagacagagctatacggttactaagaaaacttgctttaaaaccatctaaagtctgtatacattccatcaagcagatgtgtgtttgcgcagtgaaaatgcrgcacagatgttaaaaggtaaatatttttctaagctctagccgatgggtggattagacacctacatctatcagggtgcgtattttccttggataggaccataaaccagcaccgtttcagtcctcaatgggcagtgttcagatagcctccctgatgccatgtgaataaaagaaacccatctatactaatgttcttctccagtgcacgggccctggagagtggcctttcctctggcctctgtagctggaggttaagacagatttctgcaagattctgacagccctttagcagtctgtctgggctgggataagaggaaaggatgctggctgcagttttgcccatggaaaaatacccggtgtagaggtggctgtgccctccctcccatcattactcctacactacctcagcaaagccatagccaagcctcagggaccacaatgatatcacacccygaggaccttcagagggactgactgagaggtctgggggtgctctggggtcctgtgctggtgtcccagagctgagggagcaagggatgctcacttcccctgcgtgccatcttgcctgaccctgccccagctctgctccatgggagcagggccagcagtgggaccacaccagcgcccattgaccgagcagcaggaaggaagctggggaaagccagcccttgaggatgctgtttgaaaatcagaacgagcagggccagggtggaatgaagccaccaactacccccgaccctcaccattttctcagctattacaacccagcaggctgttgggaagctgaggccttgcttccttagactcaaggtctgtggcacccatagtcttaaccttgagcactgctaggatcccagtaggcaccttccaaagtcacaaggctggggtgcagtagagctgcaaaggtgtcagcagccaagactcccgctctaaagagcattcacttgtcatcaaactcagcatacccatcctccaaatgcacgcactgcattacatttttatctgttgagtcatggactgcagatttaacatgtgctcagcataaaactaggcacggtgtcaggggttgagggtggggtcctgccctggagttgcttataatcttatggaggaggaaaagcaaccacacatgaaatgacaacaatcttaaaagatggaatcatcaggaggctgaggcgggcggatcacctgaagtcaggagttcgagaccagcctgaccaacatggtgaaaccccgcctctactaaagatacaaaaattagccgggtgtggtggcacaygcctatagtcccagctactcaggaggctgaggcaggaagatcacttgaacctgggaggtggaggttgcagtgagccaagatcacaccattgtactccagcctgggtgacagagcaaaaaaaaaaaaaaaagatgaaatcagacgctcatgtgtgtggcatagattattaatgcaatcgaaattcagaagccagtgaactgagaaaatgctgcagctagcagagtactttgcatgaaattctaatatttttctgttggtgattctgatactctccttttgccattttagtcccataaacttcagaaaatggaaatgtcttggttgtccttcatgacattaaagagcatttcaaagaagggatgttctaggaataagctttgttaacacagaggcgatatagaaacactcctattgttacaattagtaatagtgaaaatataaagaatatgcaaatgactgataaagaaggtagggggaaatggaaaaaaagctctgactacttaaacgggggcaggggattactgagaaatagagggaaccgatgtgaagatctgatatgaaggctaggggatgaagaaggcaaagcctggagactttgaagacaggcgccgccaaactagtcccctcgccttgccctcacttctgttaacttcctactgtgtgagaaaaactggtggctgcccatctaagccctaagctgcacagaagtgagcagtacagcacatgcttggttttaaatctatctatgtgatgttgccattgttttattgttggaaaaccaaccaccaaccaacagtacaaaaatgtataaagtaaaaaataaaagcccccctcctggttttcccacctcctccagctcattatgaactgttgggtggggacattgctaaaatcgtctatgtgtagacagatataggtgatgatatatttagtacatttgctgtttttgcagaaacgagagccacagtgcatactgttccatgaccggctttgtttttacttaacaaagtggctcaatgactttcacatcagcccagatagaatggcctctgccttgctcagggcagcagcccaggctgctcttcactgccccagaacctgcctgaccagtgctatactaagggacattcaggtggcttccaggttctcaccgtcccagataacccagcaatgaggaagcttgttgctactgagctcttcaaaagctatgcccatgtatcttcctcctttgttctccaggaagcctcactcttcatgactgtaaggtcaaaatgtgcatttttctccttttgttccttagaggcggagagacttcctccaaatggtcctggatgcccgacattctgcaagtcccatgggcgtgcaagactttgacatcgtcagagacgttttctcctctactgggtgcaagccgaacccttcccggmaacaccagcccagccctatggccaggcctttgactgtggatgagaytgtgggccaggccttcatcttcctcatcgctggctatgaaatcatcaccaacacactttcttttgccacctacstactggccaccaaccctgactgccaagagaagcttctgagagaggtagacgtttttaaggagaaacacgtgagtacaagttggatccagttacccatgggatatccayaggacaattgattttgtgtttgtgggagtgaaacttatttttaatgacttgctaatatcacattctaagcttataagatgaaatagggtcattgcttggcttctcctgctctccgggttagcaagcgaaatgaaatgttgagaacaataaccacaacaaaaagacaaattgtgtgtgcaccttcactgtctggggtagtccatgaagccaggcctggctcgaggaagctgtggaagcccaggaaggtgtcaggcccaaagggcagggatggggaaggagtcatggcttcccaatatctgacttggagctgccacacggagggaggcaggtgtgagccagaaaggagagccaagatagaaggcaggagtggacaaaaggacaggccaagctgaagctggactgaagactggaagctgaggaggaggctcacaaatggaataagggaagatggggcccgtcagcgcccaggccagcttcagggcattttcttctagatgaggcccctcttgatcgyttatagcagatataacgagggtgctgagcaaggctactttatcacctcattttttcytctagatgcttgtgtgtgtataactttgactcatgagttgtcaaagagattcatttttaaaatctgtactttaaaaggaagaccaccacagtggaatcctttctgttacattctgatatgattgctattacattcaccattttgaaaggtggtctgttctgttactggaaccattaaaaaatgtttcatacaatgaactgaaaaccacttcccgggaaattctacttctttattctactggggaagtaaaggcaaagtcartgtctcttcttcacagcagtttttaaatatttgaaaactgcattcactgtgttactaattaattgtcttaactttaggctcaacatgagtttatggtcaacttcaagttctaagtagttatgacaactgccaagctgggcctttccaaaccctgcttacacaattgatttattgagcctagacggaagagtttatatttatccttattactgttcaagtcagtcaaaataattttgaatcttgattctgccatctgttatattagcaattcctccagcctcgtgtcatctgagacttattaagcatgtctcctatttcatccaagtcattgattaaaatgttgaacaggacaggacttccctccagattgacattgatccattaatcaatattctttgggcatggaatctcaacaagccatgaatccaaataaccctgccacccatcttattctgttttatatgtagtggtttgtgtatttgttcttaaattgaggaaagggtagagggagggaccaacggtgactggggtgcattagtgcaaaagaagtaaaaggagctggaagcgaggcaatctattaggatacatttagttgcagataacagaaccccaacccaactgatttaagcaaaacaaaaacaaaaagtaaaaacaaacaaaaagactcataaatgtgtatttctgagtacatttaattgagcagctcaggaatagatgtggctccaggcaaatctttgtctaggtctcaaactggtgcacaggtccgtttctctctcgccagttcttggctgtgctctcttatattggccccatcctccatcatgctctcctctcaaagccccaagaagcctgtcaagagtgtctgggactccatacttccttgcttgtaaccaatggagaagagagggtctgtggcctaaaattcccagaaagagtcatgagggtcactctgacgggaatgcttaggtcgctgcccattcttttttattttttttttgagatgaagtttcactcttgttgccgaggctggagtgcaatggcacaatcctggctcactgcaacccacacctcccaggttcaagcaattctcctgcctcagcctcccgagttgctggcattacagacattcaccaccacaactggctaattttgtatttttagtagatacggggtttcaccacgttggtcaggctggtctcgaactcccaacctcaggtgatccgcctgcctcggcctcccaaagtgctgggattacaggcgtaagccaccacgattggcctgctgcccattcttgaaccaactcttgaagcaaggggaatggggtccctgataggcttacaccaatcagactctagccctcagtcaatcatgctcaagtcacatgactgagaacttgggaaggtgacttctcaagggaagcttagcatgctgtcccaggaaggcattagagggaagcccagcgctctggtctcagtaaaccagaaatcacaccaaattaagggctttgaagcatctaatgagtgtccagcagtttagtagacacagcagaggctaggagagggggcagaagctctaagagatagaagtcaggtcctcatcttgcgggaattccatcgccaattgagaagcaatgttatgtctatgaaacaatattttccttccaaacacaggcctgcagggcagtagaaggcagaagataatcaggtctagaatgtgtgatgtcatttagagagccatggggcgataggagtctgtcccaccagctataacmatagtcacatccagttatgtcagtctgccaggaggacacagcaagtgctcatgttaggccaggcacagtggctcatgccagtggctcatcccagcactttgggaggccgaggtgggtggatcacctgaggtcaggagttcaagaccagcctgaccaacacagtaaaactccatctctactaaaactacaaaattagctgggtgtggtggcacatgcctgtaatcccagctactcgggaggctgaggcaggagaatcacttgaagcagggaggcggaggttgcagtgagcaaagattgtgccattgccctccagcctgggcaataagaaagaaactccgtctcaaaaaaaaaaaggaccacatgttattatggggctgtacagactgttgcaaagcactgagaccccttggtcaaataaacacattacagcaggtcaaatttttgagtttagtgtgcataaaagtatataggaagactgcttagaatgcactttccagggtcctgacctcaggggttccgattccataagtctgggctgggacccaggaacccgcattttattttattttattttttgagatggagtctcgctctrtcatccaggctggagtgcagtggcacaatcttggctcacagcaaactccgccgcctaaggaacccacgttttaaataaatgtttccagtgattctgatgcaggtggtccctggttccactttgagaagacagccttagactctcaagggctcggatccctcttccaagaaaaaaaatcagggtccaaagccctcctaagccatgcaagccacaaggtgattttcttcccctatgtgatagctggttgtgggggggagtctctgaaaaatgggaatatctacagctgtctttttaaaaacatacatttggtagtcacaataatgttgctttgcatagccttgcacatggcacccactcaatgaatattggtaggttttctttttttcttttctttctttccttcttttatttttttaattttttttttttttactataatcagagctctgttaatatgggccatctgtcaggacatggaaatgcagattagatgttcacacattagatattttcctgaaaatattcctgaaaatttgcatgtaaagtatgacttgttataattttcctgctggtttccattcaacaaatatttcttgagtgccagttaatgccagactccggggctccagccctacgcacgagggtgttctggtctagctcttctgtgacatccctgtagagcatccccatgcctcattagatggccttcccttgtatttgtcaatgagattgcttaatttgagctctagagtttcttttccctgagcaatttctttcatagcaatgcaccatgggaatctgatgagagctacatctcttcctccaagaaagagcagatatgtgcatggcatcagttcagactcttctgtggacagtgataaaaaaaactcagcccagattgtctcagggagtttactgacccctayaactgaaaactccagagggcagagctgccttcaggtatggcttgattcaggggctcaagccctgtccaagttgttctctctccccatttctcagctccggtttctctgggcacactcccttctcaggcacatctyccctaggggtctcaagccagctgtgtaaccagtgttttgaacagtctcaactcagtgaggtaccaacttgaaaccatttggtgttttttgtttcatttttttcccttaaatgtgctctgatgaatctcctttccctgtccgtgatgatactttggacagatctcaatgatttctggtcattttggggggcattaaaaagtccaggccagtctggcccagatgaaaacttcaggctcaaatccaatcagtgcccttctgttctcttagctcargctgacctgtggcctgaggatgccgccctgcgggaggagaggtctgttttttcccctccttctacccctcccccamccctgctgggcccctttctcctccaggagtggggcctgtgaacggatccccaaatcctgcctacctggagctgccctcagtgccttccctgcggggcttctgacgtggggtagatgcaagacgtattcggagggctcccaggtctgaagtcctcactgcataattccctgccagggagacaggctccagctcctgccaccagctcctgccccaaggctgcttgatggggaatcttgagcaggataccagctagatggctccagcttccatgccttccccagtgtccgcccagcctatgggaaacacacaactgggccacacccacagtggccaccttctgccctctccttcctccctccaccctgtcatgtctctccaagtacttttcctttgctcaaataggcagagagggcacatcagcaattctgctgcatgagcagatggccaaggagaatggcccacctctatgagtggctctgctgaagaccctcttccttggcttgggagtagggaggaccctcttccctaggccaatgactccttgctctaagttttctttaaatccctctaatgtctttataggctgaggatgggggtaggagagagtaggttcaagttcaacgggaagaagcaagagtctctttcctgcaagtctcagcaaaagcctcctggcatcccagtgacttcgagagggtcatgcacctgccccctcaaccaatctttggaccccagaggaatatgatcccctgattggcttagacttgggtcatgtgccccatccttggagttggtgtctaggtgaggccttacccaaaccactgagctctcgagcggaggagaggttgatccccaaatcactcttattaaaagtggggtaaatggcttctgggtagccaggaaacagtgtgtttgcccacccctgtacatagaatctgtggcccccagattagaagttcccacctctcaatttcctgttatgtgatcatgttcaccttccctctgaacttttaaaatccagcttgccaaattagaaggtataagtccggcagtgcctggaacagcctgctcttgcctgtttcttgcaaatcatcccaagttccctgtgatttctgcaggaccagtcggtccagctcagcagttttgccttattgcatccttcaccatttgagaagtgaaaatgtcaggcatgaaagtcaataattcagattctctactgttagcagttctaaacccctggcgcatataaagatactcaaaggtctccctcactatcggggatctgcctccgcacatcctgtctggcaacatcccatctctcatcccatacagccttgactgcattctcctttcagggtatagattttggttccagcttctaaaacagttacaatccacttttttgtttgtttttgttttgttttgttttgtttttgagacagagtcttgctctgtcgcccaggctggtgtgcagtggtgcaatcttggctcattgcaacctccacttcccaggttcaagtgattctcctgcctcagcctcccaagtagctggaattacaggtgtgtgccaccatgcctggctaatttttgtatttttagtagacatgggatttttccatgttggtcagtctggtcttgaactcctggcctcaagtgatccgcctgcctcagcctcccaaagtgctggaattacaggcgtgagccaccgcgcccggcttcaatccactttttaattcatgcccccagactgattctttctggrccacatgtgttttcttccaaatcgtcttgtttgggaattttatctggcctctcctcctcttgtcccaccatcaaaattcagtgtaaaatcttctttctcaagtcccccaatctcttggagaagtctctcttttcccatgttgccttggtctatggaaaaggaggtagtacgttcagtaaattcaatagtggatgggtgggaaaaggtttgtaccatttgtaccactcgtaaagctgaaaaaaccacaccatctatttaatgagacctttgttatatggctgcttcattgtgttctcatgtaattttgaaaaggatgagaaaggaaaaaaaccaacttcttttcatataaattgtgtcttctatagctttagtgttctatgttgaaattattgacttttgatctggctaaaccattctcttttcttctctttggtgctggactctgccagccaaaatttatgacccattttccttctgcttaattgttgttataaatctgctgtgcagaacccagttgtaaatttatcacagactggattggattgatatacagcctctctttaggataatttgaacacagttatgccttagaaggaaggccaaattcttaaaacttctcttgaagagctgctttgtaaccattataaatatctaattaaaatacaacttactctttctttttctcttaaggataaaagaacattctgtgctggttatttcagcttattagctcatgctgctgtgtgagcaaggttgaggatttgttccttgaagcagtcagaggatctccaagaaaaaaaagcatattatgtgcttacaaaaaaaaaaaaaaaaaaagccgttttacccccaactagctttttcatgaatacacatcctttgtcacagggaaagggttgagcaggaaaaaaagtgaatagcttaacacaaatctatcctcactatggaaaaaaaaaatgtcttcccatgtggatctcacccagggaggagggcatggttggctttgagatcaagtagaaaactggaaatgggtttttccccatggggaaggtttcctcccctttgcccaggtctgctggggtcgggctacccacagttggtgaggagtaagttcaggagttccccatcaattcagtcccccagccacacaggggtcagaggtgctgctgagtctctgccttctgacagaccccacaacagcacaacaggacaacagagcacaaagccacagggacaagggaagaggcaaaacagagaacgccttacagccctaatgttgaatctaaaacaaagaacagcgtcactgcagcgtgagaaaagtggcaacgggctgtggcaccggcccttggttagggcatcacaaagtttaacgtgcacgggaatcacctgggagtcactaaatctgcagattttgattcagcaggtctgggacgagcctgagggtctgcatttcttttttgtgattattattttgtatttatgagacggagtctcactgtccccgaggctggagtgcagtggcacgatcttggctcactgcagcctccatctcccaggattaagtgattctcctgcctcagcctctcgagtagctgggattacaggctcacgccaccatgcccagctaatttttgtatttttagtagagacagggtttcaccatgttggacaggctagtctcgaactcctgacctcaggtgatctgcccgcctcggcctcccaaagtgctgggattacaggcgtgagccaccgtgcccggccaagggtctgcatttctaaccagctcccaggtgatgctgatacagccagtccatggcccacactatgtacaaggagccaggttctgaaccatacgtactgtgtctctctcacgtgtgctggacatggcaagtatgtattcctcatgacatttaatgtgctcatgttcttcagtggtttaccttttgctaataaatctcagtggtttcctgatyattccataatcatgatggcattcactttattgagtgggagatgaagtgatgcaggaatgagccaatcctaatacatkttagaagtgtattaatcctaaataaagcctaaaatcatctattttcttcagtaattgtttccatggtgggaggttagggggagcttttgaggtgatttaaagtcattttcaaagcagatgaagacggcaacctgagctttctgtcaggacatgtgtgtagactggagacctatcacatccaacgggaccctcaggccaatccttttaagcagggggctccacccagccccttagcttccctactcccctaagccccttggttgtagacagtagcttcgggtgccaggtgggaggccatgccaaacaactatagccaaagagcatgtctctgatgccatttctttggtggcctaggacagaatctgagctatttccactagaggaataggagcttcagcagggggccttggaaatgtatccaaggtacccacctcctgtccttctttctggaagcatctggccctgggaagtagcatcccgaccactaatatcagggcactaatatcaggcaaagggaggaaaagttgcatcctgaccactaatatcagaaaggcccctcctcccagcccgtgaagaggggcctctctgggtgtgtacctggaaccctatcttggaagttaagwtttgtggtcactgctaccaacacaccaactcccaggacacaggatactagggacttctgtgccccatcagtggacaagtcacaagttcccaaagcagggtgaccaatcgatctggatcaggtggcagggcctcggatcttaactgtccatttcattgttatgcacacaaacttatcttagagatccggccatctgcctgttcccgtcctggggatacctgcgggaaggcaggctgtgcctcccagaggtcatctgggctgcaaatgggtgccaagaccttcctctgcccctactcaggactccagactcctccacatcccctggagatactcaaagcccatgcccacagtaacccgtagggaaactgacccgctctgcctgggagctgctcccaggagcctcagcagtggcaaccaggagcttagagaccgctgtgcctctccctgcccaccctctccctctcatcctgccccatttctctgttgtctttcctctttcctctcttcattgttcacagcactatttaatctccttcccctctttcttcccttattcttgttctgactctattcccaggtccagagaggcccagaatcttctctgctcctgctccacctcctgacccactgccccctgggagcccctggtcatcccagaagcctgtaagtgcacacagcagccaagacccacatgcctgcaatgggggtggcacaggggaggcagggtgaagagcaggacagacttgcaggtgtttttttctgggctgcctggcttcatcaactgcaacactccagcactttgaatttttagcaattaatgccccaagtccccctccccctgagtccctgcagagcagagggaggggcacctgcaaagagaagtctctcccaggaatgggtcacaccaatcagcatgtatgtggtgtctttcatgtagcaaatcagagtctttcatattcaatagctgggcctctagagggaccaagctttgctaagcaaataagcttgtggggttggttcacatccatccagaaaagcaagaatgaaaaataaacttgggaaagtcagctccacaggtgaagctcaaccttctgtgcatctgcttggcatggagctacatttgcaactgaatggctcatttatttaactattgcacacattatgggctcttaaaacatcaaaagaatgggttttattcccaacaattagctcttgaaataaaagaataaacatactttttttttaacttccccagactctgttgaccaaagtcgctttcacaccagtggagtggaagctccaaaatggtatcatctggtgggaatttaaagacttcttgtccccaaaaaaccttttcgtcactaggcttaaaattttccattgggaggccctggctttgttttgacacatgatccgttattaacacaccactcattttgggaggggaatatcatcaagtcccagccaggatgtaaaccccacgactaggaagcctcgtccgctgggtaccttggtaggtcccagggccgagcacagtgcctggcacgtgagaaataggtgttgagaaaagttatttcactcttccttttctaactggaaaccaactccaagcacagatttgasgggggacgagcagggaggcacagtagataaagcctgtgagttactgcgcccagcgagaaaggggtcggtggagtcaaagagagaaggcactgcgtggggagatggaggcaggttgaaggcaacacttggagtccctatagtcctacaattgcagtgcaattgcccagaagatatcatgctaagaaaaggagggagcctcagccctcggcctccgaggagacctctggggacatctagggcagcttcccatccaggacagatatctgaaagatcatgaggctgggcttgaatcctgctgacaacaagaaacttactacctatgtcccctaccgctgctatggtccgcctcctctgtcagctcatggtatttgagcacctactaaatcagcaaattaatagcttctgcctgggggctgcttccacactccactaatagccaatcgctgggcatctcagagccgagagaggaaggaaaattggaaaatgagtctagaataaggggcctttccaaaatgtgtgcttatggcccagacactcctttaaccctaggttttccagaaagtctgttttgccccaggactgtggacagcattatgktttgtttggtgagctttcttttttttttttttttaggttgtattttataactgaatatggcatgtgtgaaaatatcagctaccagactctgttagtccaggcgtatgaatattccagatcacaagggaggtgtgactcccctgtgaattgcaatgcggaaggtttataaagttaatcatttagaaatctgtctttaaaatttaaatatttagattgggtcgctaggacacaaaaggcaattcctgtttctcactcacttaatttgatttttttttcttttggtcgcacaagttgtttttcaaagcctcattcctcgaatgttccctataggaggaatgtaattaaactccactggcctccccctgctgggaccaaacaggggccagagctgtagggagcataaaacagatatcctgcaaaagaatccttattataaagatgagaagagaatcaacttccctctggttatgaacaagaagctttagaaagccacccaggctatttttgcaatgggcttagtctccaagacattttaattagtaatttaagactggaaggaaggggataaactcctcacctccctggctataggcaagaacttcaactggatgagtaactggttcaagtggctgaaaaggagggaggtccagagggagggtggttccttaaaatgaaccaactttttcatgaaaatggcatagctagatatcccggcccccagtcagtcactgtttttgcagtcccacttcttaaggcagttctcacccctcaccagaggcaggcactgcctctctctgggacactcggctggcaccagagcaaagaagcttgtgctgagggatggttcccctcacaccgggccaacctggacttctctctgaccaaagagcatatgcctcccaccaagcgagaaggtggaaagatcctggcagggaaccccgagacctgggtgctagcatcatccccgccatgagagcacacggggcccctgagctgacacctgctggcaatgtgacgtggatcactcacataatcccttccttagtttttctgtctgtaaaatggggatagtaacattgtgtagctcataaggttgtcaccaagattaaacgagttaagaatacacgtgcaatgtttgaacagcgccagcattacgtacatatagctactctcattcgcctttctgtgactcagtttccttatctgtaaaagaaaaaggttggactagacctcttctccactgttattgatgatgatgatgataaatgaatgtttctgtgccagatcctaaactaaacaaaagttaacttgatactcacaatggctgtatgaagygggagttatcaccatccccatttcatcagtggggaaagaaaggctggattagtcagggatctccagaggaaccgaactaataggacagagacagaaagacattcattttcaggaattggctcatgtaatttatggagtttggcaagtgtgaagtctgcagggcaggctggcagtttggacaaccaggcaggagtcaatgcaacagtctagacacagaattctttcttcgccagaaaacctcagtttttgctcttacggccttcaaccgattggatgaggcacgcccatattattgaggataatctcctcaaagtcagctgattttaagtgttaaccatatctaccgaagaccttcccagcaaccctgggattcatgtttgattaaataactgcacacwatagcctagcaaagttgacacaaaagactaaccaagctaaataacttgagaacataagataataccctaggacagggcctaggtcggattggcactcacgtttcccgactccttagtctgtattcttttcaaccttgtctctaatattccatgattccatggttctgatgccattcctcagcgctctgctgttcttgcctgaccaagtggatcaatggtggctctggcatttctataaaggggatttcagggctgcctgctggggagggaggcttgaagctgtgtctgcactgcatcttcacagcactgagaaaatgccagtcattcaggaggacagggcagccctgtcctcgccacagtgcccgcatcttcattggttcacctttgcaggtatcatctgtgacctgtcatccaggctctgagccctgaggataataagtytccctcgaaggtcctgggtttgttggagctttttctccctcttgccatgtccttttcacggtccatcctctgagtttgtgaattatctttcttcgtggcccatgtggcacaagatgaagagtgcatgggcagcttctcccctgacatccctacctccctgacgcttaacccacatagggaagaacattcctgaaacagagacgtcacccagggttgctttctgccacagcaggcactctgcttcgtgcctttctcacttccatttgtaaatgatcttgtctccttccttgtagaaagcttttcagccattccaggctttctctttgggttccatccctctgggattttccacgaattgcatttccttgtagttcattttcatcattttccttgttagggaaatgcacctgagacattggcatgcagcctgattgcccccggcctcccctctgctcattgccagagctacctctgcacagaggagtcactctcctcccactccagggcctctgtcaggggccaggcttgatgctgtcaccagccagctcttcactgctgcccagtgccatattcatatccattgagacaagtccctgggaaatggttgggagccgggggacagccctgcatcctgagatcctaagatcagggaggttctccctgcactcccagctggaaggagactggatcggccaccctcaccaaattcccagattctctgactgaagcaagccagtccttggtttgaatggggaatcaactcagggttataaaatagacgccagccttcttgtaggtagaatctgacttcagacagcaaaagactctaaaacagcttaaattcctgtatatgccttctcctgtgcatgccaccggtcagaccaaaggccacacgccaatcaaggcccaagatcagccaggggtgtttccatgtcctcaagaacttttacaaactgtagctgattgggttccgcccctggagattcgatttagtgggtctggagtgaggcctgggcttcttagaagccccagcggattctaaaatgcagccaggaggaagaacsttgccagaatcccatgaggcacagatgcaaatgtgcatagtgacattgggttgcattatcaatggcaggactgactttataaacctccacatccttactggagctgctgtttgctttttagaaaagtccctcatcagattatcaggaagtcgtgggttttccgtgatcatgctgtggtcagatccagcccaaccagagagccaaaaacaaaacaarcatacaaaacaaacaaacaaacaaacaaaacccaaatccctggcaagccccacgaaatgactgctctgataacattcagcagacaagcctgtttgaaatcatctcagaatcataccagacccaaacccaagaggtcatctggtctatgcatcgactctaggagggtgtattagtccgttttcacgctgctgataaagacacacccgagactgggcaatttacaaaagaaagaggtttcatggacttacagttccacatggctggggaggcctgacaatcatggtggaaggcaaagaggagcaagtcacatcttacgtggatggcggcaggcaaagagacagcttttgcagggaaacttccttttttaaaaccatcagatctcgtgagacttactcactatcacgagaacagcacgggaaagactcgcccccatgattcaattaccgcccaccagtttcctcccacaacacaagggaattgtgggagttaaaattcaagacgaggtttgggtgaggacacagccaaaccatatcagagggtgaggggctatttctccatgttacagacaaggcacgtgaagcctagggacgttccatcacaggcccacaccttgtctcagaattaagaggaaatgcttctggctgccaggggtggggtggggtaggatgcagagcctctccctccaccaccayctccatccttttccctttctctgaaaatctcatttgatgattccccagcctggctgcaaattaaagatttgtagacctgaaagatgctaccgatggttatcagcaccaccaccaccatcgtaacagtaaacatttatggagcgccataattattcataataatttttatgtgttaaacaaatctgacctagctctataaagaaataggccctgttaaccaaaaatattggataaattaaaagtctcctagaagcatctgatgaaaggatctcaagttccataacacacggaccattcagtggtgttgtttctgggcttgattcactgtgggtcacttgaacgatgtcgggggtattgtccacctcccagtgctcagtctgtggcttgtggccagctgttcctctgtggggtctatgttggctgtgttaaggcctgctgcagaaacatctcatttctagcatgtttttctcaagcagtgatcctgtggggtcaagtcttcaatatcaaataatattgataataattatgatagaaataataagaggccaggcaccgtggctcacatttgtaatcccagcactttgggaggcagagttcaggtggatcatttgggcccaggagttcgagatcagcctggtcaacatggtgaaacccagtctctactaaaaatacaacaattagccgggcatggtggtgcacacctgtaattccagctactcgggaggctgaggcaggagaattgcttgaaaccagaaggcagaggttgcagttcgctgagattgcaccactgcactccagcctgggtgacagagtgagactctgtctcaaaaaaaaaaagaaagaaaaaagaaataaagaagaataataagaattatcagtcattgaacacgcgctctgttcttggtgctcttggtgttattccaggcaattctaacaccaattagatattttcccctattttaaagattaaagcaactggcgcagtggttcacacctgcaatcccagcactttgggaggccaaggtgggaggatcacttgaggcagggagttcaataccagcttgggcaatatagtgaaacccctgcctctacaaaaaaaaaaaaaaaaaaaaaatcaaaaattagctgaggctggtggtgcgtgctcgtactcccagctactcaggaggctgaggtgggaggattgcctgaggccaggagttggaggctgcagagagctatgatggtgccactgcactctagcatgggcgacaaaacaatagtcttgtctcaaaaaaactaaaaaagactaaagtgaaattgaaattcagagagtaagtgacttcaaggtagaggcagaaacagaggctggatttgaattcgatcctctggctccagagctcctgggagttatcttgggaatgactgcaaggtctgaggtagatcgttccaggagcaggtgcttatatacagtggaatggcacccactggcacaccrctaggaattctgttttcttaccaccaccggagccaggtctctgtcacggtgatgagaagttcccaaagtcatttctcctctctagggtgtcccctctctgtctgctgccactaaatccctaacgacattagagcgaataaatggcatttttaacttcagctttaagcaacaaagaaatactattaagtcaagatgtgtccatctttaccataaaaaaaaacaaaaaacttgcttcaataaccaataaacagatcaaacaacagaaaaataaatagcaaaagactkcagggctcgatggctcacacctgtaatcccagcactttgggaggcggaggtgggtggatcacctgaggtcaggagtttgagaccagcctgaccaatacggtgaaacccgcctctactaaaaatacaaaaattagccaggcttggtggcgtgagcctgtagtcccagctactcaggaggctgagataggagaattgcttgaacccaggaagcagaggttgcagtgagccaagattatgccactgcactccccattctgggcaacagagcaagattccatctcaawataataataataataataataataataataataaataaatagcaaaagaaagaaaaaaccctcagctaagaagtatactgttgtgttttttggggttttttttatgtaacatttgacaagtttacattttccttgtctgccttgggtgccttaaaataaaactctgtcaatatttccatgtaacattgggttttgcttttttttttcctcacgtaaaatccacatatcaggaattcctctatttattccgtcgcctgggtttctttccttgggaataatttatatgtcaaacctgtcatttatcgatttattgctgtacctagcagcatttttctccctgccctcaaaatttagcttaaagaccacttaataaggcctgtgcgggtcctcagactccagagatttctgctgatatgagccataatttagcaaaacaaatcctgctcattgcgggcatctaaatggtatcctgttaaatttccatacatgcttttcttttctaaagttatggcctacaactagaagaagggatgaaacatcacccctacctccacatcttatttcctgtatcaaatttcgaagcccttggagatgcaaggcgggtttccctaatgagttgagaatcaatgcgaatcatctgaaatgagaggtggcccgtgggtgtaatccatccctgctggtgctccaacttggttacacatttccagaaaccagcacctccctgttgtccatgtctggtcatcagaggcctctctcctcaggtgggataaccagagaccaagaaagaaacatgtttctctcccttggaatttctcttccttagtcattttcagaaagttaggagtcggcaaccttaaggaggagtttcctatcatctctcctccacttcctcccctcrtttcctccccgtcttctccttggagtccttcatcaatgtctctattttctgttcaggataaacaaagagtccctcttacctgcacaggcctcacctgccttccccccctgtcatttctgcagccagcctgtctcctgagcctggcctggcattctccaaagactccttaaggccacttggcttccggtctgcctctaggcttcactgtctgcaccagagtggaaattgtcatgtgccctcagcaacattttacccctcccttccagaacagacacaggcatttcttccacaagcagtattccacagatgaaaaaaaaaaattataaaagcgaaaccaaaaatactggtagtatatttttttcccttcaaaagaatgataatcatcagtaaaaaccacaacaacaaaaaactaagcaaagcagcctgaagataggctgaaagcacacatctacggatggcttgttgttgttttgtttttgttattgttatttttgagacacagtcttgctctgtcacccaggctggagtgcagtggcgcgatctcggctcactgcaacccccacctcccgggttcaagtgattctcctgcctcagcctcctgagtagctgggattacaggcttgtaccacccatgccccatgcccggctaatttttgtatttttagtacagactrggtttcaccatgttggccaggctggtcttgaactcctgacctcaggtgatccgcctgcgtcggcctcccagagtgctgggattacaggcatgagccaccatgcccggccaggatgttctgaatattaaactagctgaccggtggacattagctgtgctgtggaaaagtgaagcagaawggctttttatcccttgtgtatgatcatcaagacacaggacagcacagagattcaaaatacaatgcattccccttgctcgtctggtcargctcaccttcctattgcacagggttgattggttggaggccgccaacctctagctgaaaggcagagacagtctcccctgttatttcggtaccaagctgtgtttcttaggcattaaaatggagggaaagcaaccactggcccctcactgggatygttcttgaggattccagacagaccataagtaattcattgagtcgctcacaaagggcctggccctgaaggtttgtggctgcagcatccaggcgagccaaaggtgtcagtgccaccaaaatgcagagaaaactcttatcagaaagatgtcatttttttcccctaaatgtcatatatacaatttttattggagtgtgatgacagatagtgaataaattaacataaatttgcataatacaatacagctgttaatttatgatcatattaaaacacaaagttttgtmgtttgaagcagttaaaagtcttaatcttctgaaaatttccctcttgtttgttatttgtttatgagttacttagggttattagataaaatacaggcttctggttaaatttgaatctcagataaactgtaaataattttttagtgtatctcatgcaatatttgggacatacttatactaaaaagttaatcttattgtatatctgaaattcacatttaactgaatggttatattaatatttttatttgataaatcaggcaaytctgtatttcataagcagtttaacctctctctactggctcttctctggcagggcagaggggtgctgttttatggagaaaggcacttactgctgggaccttgatatctttagactgtgggggaggctggctctcctaggaacactaacagagtcaaagagatcagacaagagaggtgccagtgcaaagggggaaactgaggcaggcagcatgcctgggctttcttgacagtaccaggggtattatagccctgttttccagattttttggactacaatctcatcataagaaatataatttataattcaacccagaacacacatcccttataaatggaacaaaaagttttaggaaacatgtcaccttctatgtacaatctgctcgacatcctgttctagttgatttcatttctttaaatgccactcttaaccccctaaattgaattcatggattgaattcatggtcccctaaaggatcacagcccacatgttgaaaaacactgggttagagggtcacagttcaggaaaatgaacgaggaggttttttaaaatctactttacaaacgaggaaatgtatcgggtyccttaagagcctttccaggaaaatttttgctcatttgyggccaaactcgaaataaaacttaggtcccccaactcccaaccctgcgttttctggtttccttccaccactctttctagtatccattttcctggtctccaagttgtaatacacattctgggatccacatttacttgttttattttacataattatattacttgtatactatttccttatacttcatattcttctcaaatttccatgttttatatcatttctgatgcaaactgattacatcattgcttatggcacattcttgactgatatcaacattttaaaccaaattgtcttggtacgcaccctctgatctttggcatcttactgccctgccccatcttcaacctcggctcactattttggtgcctcaggaggtctcaaccatgaaccttccatgtgctctcactgggattggtgccatctgtgacataagaaaaacatagaaacataaaaacataagaaaaactattatttgttgtgatttgttctccctaatctatgaagtcggtagggtatctgttataaagattcccttctagagtcgagaaaacagaggctcagagaggttaagtgtttttctcagggtcacacagcaaatacagaactccagtcttcttgctgtgtctcttaccctctgtcatcaggatgcaggggctgctgagctgagatgcctgcagatgagtaaactggcgggaagaaagacaccaacccaatagatctccatgtattttatatattttctcacctactcagtctagattttcaaacaacatacagaactttctgggatcttgtcatcattcagtgtactgtcctctggatcctctccaggagccgcccactccgcacacatttttttttctagttgtcataaacaaatttcaaagaaagccattttcccagagccctttcttgtgactctaccacagttcatcctggtttgcagaatccaaactcagggcttccttccaatatttttattagttcagtagtcgatcagtttgcacagagaagtggattggagctccccttcccttggagctgccagtggagaaagtctcctccaaccctcaggctcagcaccactcagggccagtgagatgcacaaacagcatcttgcaggtaccacaatgccttcatcasttgtatcttccccgaccctgtgatgaagtaggatgaagatggctgagggtatggacgttgggcccacctccctggcttaaagctgctggaccccttacccggccatgtggccctggggcatgacacagttccccctaagcctcgcttcttcactgtttaaaggggataataatagcatctgctctgttagactgagggctggttaagtggaataacatacktagcacatagcctggtacccacttattttttttattttgctactttgtttcaaatcttcaaatcttcctattattccttttttacagagccatgtcagaaaccttagattcacgtcccttccatgtgtcccttccacatgtccctccttgacctgccacaatgcctctgctccacccagagcctcagcacctgcgttctgccccctcagtaaccagggtccctcacctgccactcctgggttgctctctccttttgaactagaaatttttctaccctcctgcccctccagccaaaattacctttttgatgtcccatttccccaggacactattttgtcctagggatcaaaaataaaaaaataagaaagaaagaragagagagagagagagagagagagaaagaaagaaagggaagggggaaagaaagaagaaaagaagaagaaagaaagaagaaagaaaaagaaagaggaaggaaggaaaagaaagaaagaaagaagaaaaagaaaagaaagaaagaaagcaggaaagaaagaaagaaaagaaagaaagaaagggaagggggaaagaaagaaaagaagaagaaagaaagaggaaggaaggaaggaaaagaaagaaagaagaaagagaaagaaagaaaagaaagaaagcagcaaagaaagaaaggaaagaaagaaagaaggaaagaaagaaagaaagaaaagaaaagaaagaaagaaagaaaagatcaaattaccaggatctgaggacctgggaggatttcagaaatcgctggtcagtcccagcaactaaggctcaaatgccctccccaggattctgctggagatcattctgccagtcrctccaggagcgaggggctcacctcttcctaaggcaggactttccacgaggctagaccagaccagtgtcctccaattaattcatttccctgtgtcttccatccatggtttcaaactctgggaccccaaagcacagtggccctttacaaagttgaaggctatgtccctctggcttctgcagcttttcctgatgtggcagggtttcaggtcccctgcccatccaccccccacccctctagcctgactgtctgtgtccctctagagggtgacatgccttgaatggcagcgaaccctggtgtgggctgatggtgtggagtacagagcggtagccgctgccctgttatcagctgcttccaaaggccagggtggtcgttagtgcatcattaataacccattatcgggttgtcatctctgaatttatctaaatttatctcamttattgtaaccctgtagactgataagccctataagtataaaatacactggatgaaaaagctacttcctattatttgttctaaaaaattaactccttcaagtaatctagagtttggtgaccaatttcttattttaccctcctcacatcttcaaaactcagcactggtgatttcacgtctgttgatgggattcatctgtccccctccactagactggaagctccccatagggtgagacccactatagcatcccccaatgtccagcacggaactggagcatcacaggtgccctgaggaatgaatgggtggacggcgcttacagactcgggtgccacttcctcttgtccagctccatgccctcccccatagtgtgtggaccatygggggcctagaactgaggtcctggttggtagcacccaggagcctgttcccaacatggccccatggcagggcctggtctccaggtgtggcatgaggtgctacatgagcattctgtgagcatcttcagggagaaaacaaagtgttggccaggcccaccggaacagcggcccacctaaacaggctggcgggcggaggagtgccacagaatggacatggggaggccttacaaggtctgtagtagcagaggtagtgaatgtttgttgagttctctctatgcgctagtgttattctaagtgaggtccatgggccacgctttttgctgactacaactctgtggagtaggactaggattatccccattttcctgggtgagaagctgaggctgccagagttaagttgactagggccacacagctgagaagtggtgaagcataaattgaaacttgggcagtctgactcccatatactttaaaagaaaatatttccatagattattggggaacaggtggtatttggttacatgagtaagttctttaggggtgatttgtgagattttggtgcacccatcacccaagcagtatataatgaacccaatttatagtcttttatccctcacccccttcccacctctccccccaagtttccaaagtccattgtatcattcttatgcctttgcatcctcatagctcccgcttatgagtgagaacataccatgtttggttttccattcctaagttacttcacttagaataatcgtctccagttccacccacattgctgcaaatgccattaactcattcctttttatggctgagtagtattccatcatatatatatatatatacatayatatatatatatatgtgtgtgtgtgtgtgtgtgtgtgtgtgtgtgtgtgtatatatatatatatatatacaccatagtttctttatccactagttgatgggcatttgggctggttccacatttttgcaattgcgaatttgtgtgcaagtttgcttttaaccactatgcgatcttggctctcaaggtggaaatttgatgtggaaagcagagtcaggccctggaagaatcccccaggctatctgtaagagctagaatcggtatgatgttctagaagcaattggcctgggcagtgccctgagagcttagcagtgcagtcatgagccagcactctgcctgggtctctgtcacagagtttctcgtgcttggctgcagcctggagccaccttggggagcttgatgcctggggctccccacggattccagtgtcatcggcctgggcatttggcatttgggatattcacaagctccttggtgactccagggtgcagccgaggttgagaaccattgggaatagaaaagcaagaggaagctgttctcacctgccctttccacaccagagccccagggtcccggggagactaaagctggggtctatttctattcccccaaccaagacgggagcttcacatccccacayactgagaggccagaatgggtcagaccagagtgagtgtgctctggctaagactggccgacagctctgytcccctggggtggggactggacgtggccctttggtttaactgcattttactctttccagcctgtctggccattattcttgcaggagcacgcaggactaaagtccccttcctcagcaccacgcatgtcccatctcaccctgtgtcttccaacttcacttgccataaatcagttgtcaggacccccgaccctaaaacagtcacctaatgataaatcatgtttaattctaatggaaccctcccgccaagactactcatcagagaggaagctaattcgcagggatatgaagagctttctaaaattagttccagacgttttttgtcttaaatctgtattatggctgccctatttttaatttactttttgaaaaaccacattgggacactaagtaatctgggggcccaaaagactttgggggccacgggaacctcccaggccctagggggcagtagcaccaccatgcagatcaccagttccacaaaagaacggaactccaccagtacctagtgttattagtataagttttgggaaagrtccttcttttcttagctcattagaaaaacaatcacagcatcctatggactgggccaaagtgggcagacattgcagtccagcccaaagaggcctgtcccagcaggacgccaggggacagggtcagaaagaggcagcccacaagctgagcacagctgcagaggttttagcttgcttactacatttgaattaattgccaaacttttaaactcaggggaattccrcaaaaatctaggtaccagcttttcttgaagacaacggaagctcaggccaccctgaggccatcacctctggcagtcacctgccaagcacgtggctccagcttagcccgagcgcctccacctgccccgtcaaggcccagatgcagtggcccttacccatcacacttgcgctgttctgaccacagactcacagtcatggtcccacctggccccatggacatttgggtttgcatcatcatctaatgacacagtgaagctccttggcctaccagctccctttgtgttcaccttgaccagcccccagctccttgcttctgcatcttgacttctgccgtggtcctgcccagaaccctgagggctgtttctcttccctactcccctccggcttctccttcctacctttccacgctgcaggatggggtacttctgcttgcctcagctgcctggcccctccaaagcctcctttgaccatcagcccagcttgcatggatgcccgggacacatacagcactttcttggtcttggtttacaaagtagtctgccccagtggtcccaccacacctccaatcaactccagaccccagccagccacttgaaaatctgtagtccaggccagagggcaaaaggcacagtcgaggacaaggagcaggcatcccgtgtggcgggagcaggaacactcttgctcagggtgctgtgcgatgggccattggtaggtagtcccagctggtctggygtgtgaggggagaggcaggttcacccagctgtctgtgccygggcagggcaactcccgaagtgggctgagggagagctctccgtgatctctaaggagggaggcagcgcattgcagggttagcaaacctttagaagatcctcccggtgttcttcctcccgctcctgccctgcccatagcagaaatcaacaacacgtgggcactgagctcttttccagaaactttccaaagagacccatgggtctggccaagaccctcaggggttgccctcattggcctggggacagtttttgagcgactgctctttgagaagaagtcagcatcagagggagtcagagaagaggggtaagcaagctaggttggggagctgctacccccaaatcagactgcaaagacaggcaagggtcatggccacttccgtgggcccagtgccagacagctccacagaggctcagagagggctgaagggccaagcctaaggaaaacaacaaggctgaaactccccatgtctaacgacatcgtgagcgtggctgcagagctcccacatggcttcctcctccttcccaaggggctgccccaccgctttgccctcactagccagagcaatctaccttgttcactttgcccaagacacagggaggacccytgtggtctttgcaggggcttcacccagttgagctgggaagagacctcacagcatcctccccatctccctggcccgggtttagaatactgaagacacatagtcctgtcctccgtggcctacgcagatccttcctgttcctgagatctctggccccatgcgggcccatctctgcattcctagcttggtggatgccctgcctatctggcttctacctttgattgttcccttggtcactccgatgccatggtcctatagcaatcagggtgctgagtgagtccctgcctgtcctgccttataaggaagagacaattatttgtgtcctgcccatctttgctcatcattgtcatgggttttagaatcaagccgacttggcttttcactcccttaacactgtgagctcctccttatgcaaaacaccacaggcctgcccgccggccttaagcacacacccttctgagcctcagttttcctgtctgtaaaataaaactcaatgaaatgacacaagtgaaactcacctggtgcctgccctcttctcataaatggcccattgcttctgttctcctctcctcccccaggccaggcctcccctccctagtcctcatcttatacccacacctccctgcccctcactcagggccttggctctgaagggagaccccgaggccatctgaaagtgtgagcacagctggcggtggtggctggcatccaggggacgtgagggcgcattcgccccagcgcagcattcctccttcctaagcttgcacagggcctggtattgaagggcagcagattcattccagcatgactactgcagctacctgtgtctcctggcggaaggggcagcctcaggagtgtggagttcagggatccagctttgacttggccacgcccagagccagccagcctcgagcacctgtttcctgtctgggggcacgggaaccctcctgtcctccagggaccccagcctcctcatctctgctgggcagtcatctactacccctggttctgacccctgagacctcttgtcctggagcccgcagggtccagctcagctgtgccccctctcggggccgctctggtggcttctttgctgccaccctccccacccccggcactgtgctctccctgcccccactaccactctcatctggttgcccagtccatgattgtgaacttgacctctacccctggctgcctgggcctacgatcctgcaaaaacccctccaaccagctggccccacccctcaggacttccctcctgtggcagagtcacctgtgacacctggagggactccagtccagtgtgtccccaccttcaggctaacccccttggagaagcctcccgacggtgcaggcacgggggcacagaggcagcaggacattgcaggagcagagacacgaagacaaaagaaacaaatgattccttaagatccatggccaaaacaaattgccgcaattaacacgtgccactgccacgatctatgggctgaaacgtggctggaacgacgcagaagcagaaaccacagagagcgtgcgctccaataaaacggcactaaatggcacggctgtgatggaactcgtttcgattttgttccaaaaccttgtttaagtgcgtttattgtttctgtgtgaaagaacacaaatgctttttgaaaattgcttcagcataagcctcaccttctccagaaagtctttctgatccctcccatccctaccccatgcaggtccgtgacccccacgatgcccccatatgttgcccccctatgttgccacggtgcccacacttccctgtcaccaccagtgtcctcctggcttctccacccccagggactgtgcatcacccgtctccaccccaccccagaacaatgctctgtacacagcagacagcaggcagcaggtgacacaggcccaatggaatgactgtcaaggttaagggagaggtcatttatgaacatcaagggaggcacgcaggctgctaaggggacccttgcagaacagatgaaattcttattagaaagagtcagtgttgatttctcaaaaaatctatcaatcaataaaataaaagcataaagacatagaaacacataaacagagaatcgttttacatggaagatggggagtggtgacttggcctcatagggccataatcacccttttggggttttgtcccacattagaagagcagccccatagcagagataagaaaaccaaaaaagggtaacaaaaactgggcacagagtcaggactggactgaagccccggagagcacgggcagctctctagcaggtggggcaagagggactttagctgggagcacttggcccccagcctaggcaccagagctcgaggggagacccttcccattccctgagagatggagtatgggtctcacttgcaggggagcctcgtgggaatccctcatatgggaagaaggatggcatggaatggcctttctctcccccaacgcccagccaagggaggcaagccctccctgtccgctctagcaatatggcacaagggggtatgatctgccagttctcccttgagaggcttggtggggaccacctgcaggccagctggcagccccccttcacctgctcacaactagcaggccagggggtgaggcatggaccagcatctccgctgctttgagcaatcatgaaaactccaggtccatggaagataagaaattggctatcaaggctctgaggcatgtgctatctgcgatttagtaaatctcttcccacccccaaatttaattttttaaaaaacctccctcctcaagaacttcattctcatgtatcctaatccaccccgccagctcccagcagaggggagggccactctcttgggtccaaaggcccacactagcggggaagctcgcggagccatgtctctgggggccgtttttactttgttttgccactgtagaggccactcttggcaagaagcctttttcactaaaagccatcagctgcagaagaaggcaaagggctgaaatagcatcaggtggaggaggcggccctggagagaggcctggtttccatcccagctctcccaccatctgcctgtggcctctgcaagctccccaagccctgggggcyttcgtttcctccctgcaaagggagctgccctcagaagcactcagctcggttcttggcatggggagtgattagctctgcacaaacctggtagtttcacgagaagccatgtaaggtagagaagtcgctgaaggcatctccctctcagagttaaaaggaaacagaaagactggatcttgtgtctcttcctctttttaaaaagggaattaggcctggtgcagtggctcacgcctataataccagcactttgggaggccgaggtgggtggattacctgagatcaggagtttgagaccagcctggttaacacggaaaaaccccgtctctactaaaaataaaaaaattaaaaacaaacaacaacaaaaaccattagctgggcatggtagcgcacacctgtagtcccagctacttgggaggctgaggcaagagaattgcttgaacccgggaggcagaggttgcagtgagccgatccagcctgggagagagtgagactcggtctcaataaatacataaatgggaagtcatatcatcacgaggtccccacttaccctcatgacctcatctaaccctaataaccttccagaggccccgtctccaagtatatgatcatgttggggaatagggtttcaacacataaacctggggaggccggactcacacattcagtccattgcacaatgtatcaaaaattctaattgtattgggcaagcctacactgcccaattgtaagcgaagtccctgaggccggagaaatcaaggtatccatcagtgaatacagggtattaagaaatgccaaagcttactgctcaagttcatctcctgctgaccctgcggccctgctgcctgggcctagaatggacgcacttctccacaaggccttgtctttcttgagattctcacagtgtgacccgagaagcatgctccacaatttcttatcaattgaacactaaaaatcccatctagctatgggatgcctagtttctcctcctggattttgtggttaaacccttctgtctccaatgcaatgtagcagtgagcacagctctggacccgcatcccaaggcctgaggtctaacgctgcctctgccccctcctttgctgtgcagcttaggcaagtcacttcacctctctgggctgtggttcctcatccatccaatgggagggttgaactgctctttgtttgctttgctttgctttttctttttctttctttctttttttttttttttttttgagacacagtctcactctgccacccaggctggagggcagtggcttactgcagcctttgcctcccaggttcaagtgattctcctgccccagcctcccaagtagctgggattacaggtgtgcacaaccatgcccagctgattttttttgagatgaagttttgctcttgttgcccaggctggagtgcaatggcgtgatctgggctcactgcaacctctgcctcccaggttcaggtggttctcctgcctcagcctcccgcgtagctgggattacaggcacctgccaccacacttggctaattttttgtatttttagtagagatggggtttcgccatgttggccaggctggtctcaaactcctgacctcaagtgatctgcctgccttggcctcccaaagtgctgggattacaggcgtgagccattgtgcccagctgctcttcyctttttactgtcctatgactggtctcccaatgccagctgagagtgttggtctgatctcttttcttctaagctggccacacaaatggacctcagttactcagtagcccttaaaatctggtaccagtcaccatttaggcctctggacatcatccttgggcaaaggaggctttttttttaagcttgggcctagccctccccacttatatcctggactgtgaaaatggaccgagtgggcaatagggaattcaggatgagctggaaaaaaagaaaaaaaaaactcctgctgcaataaattacatcacagtggagatctctttctacccagaaaattctgagcccagacaatggctyatttatttcagacaatattcaatacaacagaattccaggtcaatagaaggatttctgcaggttcttagagttggtagcaaagggatttaacccacggagaaaagagagctgttcaataatagattcccaggcgtgagggaggccttattaataaatccatcggtggtctgctgaaaatgctgccccctcccttgcgggcatcccacctgacgacagtgggggactgatgcacccagggccctgaccagggaggacgtttgggtaaatatttgggcagagatggctgctgctagaatggtgagcagagctggggagcgcaggaaacggcccctttctcccaggccctcagatgagacatttttataaacatccaggcaggcagcctctgaagactcctgggctttacaaacacatctcgtattctatagtcagctgagaccatgctttgagcatgggcggtaagaggagcaggaagcaggaggggcggggaggggtctggcaccagctttctaaatttaacatgcagttgcttttaggccagtggataaaaaataaattccagtgcttaaagctcttatctttgtttaccatttccccaaacagctagtgacctgctctctgactcctacagcaaatcatcaacragatgcacacgaagatgagggatgggaaatgcaggaggggtgtgcggagggcaagttgatggctctccgccttcccgtcacgtttatttggcctggcagagtgaccaggatctgctaaggtcatgaggctgtccctgggtgggtgggggcgtggccatgctgcatcagaccrgtccagaggtggagggcaccttggggtctctcgtgtggctctcctgttgatgagggacctatgaatatcccacagcgaccttttcagatgctccataacctcgtgtgaaaagccccggtggacctgggcttgcctattgcattgtgaagttgtagtcctttgaaaatcctgccccacgtggagtcagaatctttctttctgggactgatgccatggggcctggctccacccccacaactgcatggcacagcactgccttttccttggccatgggctcrccctgcagatgggtgatgatgcgctcctgcctcccttcagtttgttctgttctcccaaattctttcagtgtgcctggtagaagcagtctgccagtctcccctcrctccctctcattcatcccctctctaactactcatcctgcgaccccactgacttggttttggccttgtccctgccacagttgacaaatataatggcgcgtcttcttcttcattattatcattattattactggcaatcatagtccactctgcctcaaactcctaggttcaagtgatccttccacctcggcctcccgagtagctgggattacaggtgcacaccaccatgtctggcattttttttttttttttagagatggggtttcactatgttgtccaggctggtctcgatctcctggcctcaagcaatcctgccacctcagcctcccaaagtgctgggattacaggcgtgagccaccgtgccagccatcaatggtctctcttagtcttgaatctcccaggcactgtccaggagatctgagatgttttccagggtcccttactttccagttgccctgccaccttcccctgggaagcattaaggttcaatgcttggctctgtgcttgtttttcttacccctatcccagaggactcatccccgtctgtgcgayaccatctccccacttctacrccaagctgctcacggtctcacccaggtggggtggtggagggggcctccagcaaaatcctgcaaaagctgatctccttcccctggaagatgctgccccacccatgtggtcctctttctgtgtttctctcagccacttaggaatgaaaccagggaatccctttcatctctcttcattccctgacccgttaaatcccaacaccctcacctcccctggtagagcttcctttatgacagtgattctgaaatccaggctgcatgtgataatcccttgggggacttctaaaacaataccaattcctgcaccccaatccagaccgattaagtggaaatgttttgggatgggccccagcatcaatagggaacagccaagatagacagccactgctgataaggcttctctctttcagccccttttcccattctgactactggccttgtgattggagcacctcacttttgcctggactattgcaagaacctcctgtcttattgacctatttcccaactctttctacctcagccatcctacatgtcgttgtcagatcacacaaagccattttcagtatgttatcttgactcatcaaaaaccttcagtggctccctattaccataaaaataaatctgtgaatgaacaaataaatggtttcccaaatacagagtaagttctatatggcacagaaccgtatcttatcccctctctttccctgcccctcaccccacacactctgctaatcggagtaaatagagggaaccaggatctgtggggtgagtgaacaaaagcattttctctgcaaattaaatgtggtccactcacttcccagtgcagagaaagtgggctaggtgatttaactatcacttacttaggggcttatttctttcaacatcatatacagtcagctgtgaatgttccatactaatggaaaaaacagaatcctaaatattaccaaacagcagataattcaaagactcgaatctagttgatgttggaatgcgtttttgcttatgagtgctgagtgcttgtgtctgataattggggcaatttttaaaaattaggtaattagatgtgttttatttgttcctatttccccctccccccactatacacacacactatatgaataaataactcagctcccaaaacaatgccctatttctttctctcagtcctttcctggaatagagatagtggttacatttcagaatattagcaaggaagggagaagaaactggggaggagcctgcagttagagtaaatagaagaaactaggatgtcaacaggctgcttttcaactgattcactgttaaaattttaggcagtgtgaacaacctgtctgtcaaactgtttgcaatatctactaaagctgaacatacacatccctcatgacccggcagtgccatgcccagatgtacacccaacagaaacctgtactctgttcaccaaaagccataaacaagaatgttcataaggctttattcataatggcccccaacctgggaacaactcaaatgtccattgacaaggaaaaggatggataaatcsgggcagctcacccaatggagcaccaaatcatgaggatgaacacaccacaacacacaacatgggtgactgtcacagacatgaaactgagcaaaagaaggcagaccgaaaagcctgcatggaaatatttcatttataggaagttcaagacaaagaggcaaaagtaatctctcgtgttagaagtcaagacagtggttactactgaggggcatgtgaccgggagaggccacgggtgtgcttccaagtgctggaaggttctgtcttggtctaagtgctggttacacaggaatgcttacagtgtgaaaattcattgagctctaagtttgtgtttgtgtcatatttttccatatgcgtgttattcttccataaaatgtacaagaggaaaggaagggagggaaggctggagggagggaaggtaagaccaggtaggcccaggtaatggaaaaggcttggaatttgaagacctggattcagttccaactctaccattaactggccgtgcgacctgggacaagtcacttcacctctccaaatatctggttttttttcatctataaaatagacaataaaagctgctctacctacctcacagtgtggttgtgaagaccaaatggtataatggatgtaaaaatccattggtgagcaataaagtgtttcacaaggcaaaacactattattattctagatctctgcagacagcaatttctgcagcaggtcarcactgtcagtgaagctcagcccagagccatcatggagaagactgatgccccgtgggttgtgtgtttgtgtgcgcacgcagcctggtttatgttttttcattacatctctgcacctaatcccttaatggcctgggcctcagagtacaaaaacacctggaaaaatctctgtgtttttatgagacgggttctgtccccttctaaagcaggtataaatagatgccatgtacactctcttaattactttttctcgagtatggatgaatttcaacatctaaatctgccaaattattgaagctagcacagagaactttctgggcattggccagggaagccagcaatgtggatggaaagatttatcacccsctctcataaccaaacctccatcgtatctccctgcaagccttgaaactgctcactggacccactcagacaacagagctatgggatctagaaggtgaaatgtcagagctcagagaacctcagctccctcccaaccttgccataagaactcagggctggccgggcgccatggcttacgcctataatcccagcactttgggaggccgaggtgggtgaatcacctgaggtcaggagttcaagaccagcctggccaacatggtaaaacccygtctctataaaaatacaataactacgtgggcatggtggtgagcgcctgtaattccagctacttgggaggctgacgcatgagactcgcttgaacccgggaggtggaggttgcagtgagccgagattgtaccattgcactccagcctgggggatagagcaagactctgtctccaaaaaaccagttgcaagggtgaggggctttgcctctggtttatggtcagaagggcaaagcgaaggtcaccccattttccacggcttggtttcatattatagtcccacggtccctggagaatcagagtgaatggaaatctttattcttcatatggctgtattgccccaagctgtcctcgtgcttaagggatttccagctccggcttctagagggcaagggccagcatcacttggcctacttcttagtataagaccaagtctagtgacagctgggtaggcataactactacagatgctgctgttcctactgctctgaagaagaaaactgaagccacctctgcttctatttcctttaacaacatagaaaaatgataatttttctattaggtccgtgaatctccaggaaaaatctttgtgaaagcaatgacatttttattttctttttctcatttatactccagatgacatctgcacacacacccagtgtgtggcgtatgtgtaggtgtgtgactgtgtgtgtgtgtctagctttcagagaaaatgatacacaaaatgataaatatagaaaagagattaataggagagggcagtactgttatttcctacataaaaggatttatcgatagattgcccatagagttagttccctaaaccatcaggttaatctattgtatttaaatgtatttaaatattgggccaggcagagtggctcatgcctgtgatcccagtactttaggaggctgagactggaggatcactggagtccaggagttcaasacaagcctgggcaacatagtgagatgtccccgcatctctacaaacaaacaaaaaacaattagacaggcatggtggcttgcacctgtagtcccagttactctggcggctgaggcaggaggatcgcttgagcccaggagttcaaggctgcagtgagctatgacagcaccactgcactgtagcctgggccacagagcaagaaaataaacaaacacatattggtttctagatcctaaactatatgatggaaagactaagagaccaagaatcttaggaataaaattagaagttactgcccattgaaaatcaactacatatgaaaaagtctcccccaaaatgaagaaactctggtttgagaatgtaaatcactaggtaaagattctgtttattttctttatttccatgtttcccaatatttaatttkcaaccctctaagagcagttattttataaaataagtcccagctgaaatgaatttgataggattttagaatttctttctcccttaacacatcctattagcctagttcaatagagagagcagagcgcctcatgttgaaataagctttcccgccactgaatgtgttcaaacagaaatatcacctgcttaggaggtactttccagttgccaaagacttccaccttcatcttcttgttcactctactctgcaagatgggtgggacagcattacagacgaggggtcctgtagatactgtcctgacgactggcccaaggccatggctaagggttacagacccggaacagaaccctgccctttgcctcccttgtgggacccaaagccaggccaaggtcaaggggaggsgctgcagggggggcttcctcattgggtgtggacagcaaaggttgattttgagatttccccccagctctaattctcagtaatttggcctttgaaacaggaggcagagagaaccctgggggatggcttttcatgttatcttttggaaacatagaagcttcaggtgcttcctggcttgaaataagagaatattctgctcagtcccccacatttttgagacactccaggcccagcagacccacagcaccctcactagctgttggtaacgttggtgcctggatgtactgacagaggaccaggtgtgccaagggcctgtcacccaggctgtagtgcagtggcactatctcggctcaccgcaacctctacctcccaggctcgagcaattttcctgcctcagcctcccaagtagctgggattacaggcgcccaccaccatacctggctatttttctattttgagtagagatgggatttcaccatgttgcccaggttggtctcgaactcctggcctcaagtgacaccccctgccttggcctcccaaagtgctgagattatgggcgtgagccaccgtgactggccgataagaattcttttctaaacatgaccacaataccattatcaactaaaaccaaaatgaatgttcattccttgagagcatcaaatatcctgttggattcacagttccctgattgattcatatttgttttaggttggttgcagcagcctctgaacaaggccatccacttttcactggcttattctcactcatcctaaaaatctcagcctggacattgtcgcttcctcctcacagagtccctgatcccaaatgtgggagatgtgtgtctctcatctgttctcccatctcacccttatccacttgtttgcatcctgatagactggaagctccgagaggctaggacatgtccgtgcattttaaagttacgtctcccgggcctagcacagtgcctggtgaatcatgctcgccaattccatatgtattccttgaatatgtaaatgaaggatctcctaaacagaactggttttgcattcctcgtaagcacattcgataacactttacacatccatgtcatgatttgtttaggaatcggtttcctcaatggacagagcctccttggacccccagcacctggtcccgcacctgacccatccaaggtgcccgctgaggaactgctgaatgaaagaggacttataataaattctatgttgagactttgggttcacaggccttcctctctgggcctcatttttctcctctctgtcaaggaaggatggctgggaggatttccaaggtcctttcccgggacggggagtcctcatttagcatgcgcttgttgccctctgctggcagaatttgctcaggaccgttctgtccctgctattcctgaaagctgcagacaaagccagcaactgctgggtggaccagccagtgagtgggatagggacttgagttttgttgtctcgctggttcgactaagacatggaggtgtgtgcgtccttctgcctcatccgttcattcctcaggtgtggagaagcgctagggtaggtctcagacagacagtcggaaagacctatgcccctgagtgcacattaggacagccagggggctaaaaagggagarctggtgcccaggccccacctcagaccaacactggggagtagggcccaagcatccatctatactaaaacatataaaaatctggctgtttctggctgggcgcggtggctcacacctgtaatcccagcactttgggaggccgaggcaggcggattgcctgaggtcaggagttcgagaccagcctgaccaacacggtgaaacctcatctctactgaaaatacaaaaattagccgggcgtggtggtgggtgcctgtaatcccagctactcgggaggctgaggcagaagaattgcttgaacccaggaggcagaggttgcagtgagccgagaccgggccattgtactccagcctgggcaacaagagcgaaactccgtctcaaaaaaaaaaaaaaaaaagctggctgtttctaacatgcagccacatggagaactgctgaaccaagatggtctttacatacgtatctttttgtttgtttgtctgtttgtttgagatggaggttttgctcttgatgcctaggctgtgatctcagctcactgcaacctccacctcccggttcaagcgattctcctgcctcagcctccagggtggctggggttacaggcacccaccaccatgcccagctaattttttgtacttttagtagagacagggtttcatcatgttggccaggctggtcttgaactcctcacctcaggtgatccacccacctcggcctcccaaagtgctgggattacaggcgtgagccaccgcacctggcctacatgtgcatcttgatctaaaagcctagaagcacagttaaaaagagaaaagcctatctagggaaagagtaaagactttgattttctaatacaaaattcgcttagcctatctttaaaaattttctttctttgacaaaccgtgacaacttacaagccatacagttttcttcggggaaccaacaccatttacccattagggatgctgcttccagatccagtttttctttttgagatatagttccctatttttgtgtaccgcacctctgtttcttgtttgatacatgcatattcctgcatttgttaagattcgtttggttgcagacaatggaattcagaatgttgctaacttcagctgcaagtgagaacttgttggaagggaccaagatgccacccacagggttacctgccaggagcagatggcaacaggaactggaactccatggggcaccgagaaatggtctctctgtcctttgcttctgctttgttgtatacatctgattcatttcttctttcttgaggccaactgctgttttctgctcattaatccacaaggccgaatgtggccaacaatgggtctccacttccctgtgttcaatcgccacctgctggagaaaaacttttttctttgtcccagatcgaaatttccagactggcccctttgggccagtcaatcttggcctgcagggctggctacaggatctgtgaggcccagtgagaaataaaagcgtggtagcctttattcccaaagcagggggacrtgtccatcgtggtactcagcgagcttctttgtttcttctgcagtctctttttcgacttgtcatggtgctttttattttccatttactgttgttctaagtaaagaaaactcaatgttaaattattagcaagcattttaccattcatctttatatcaaacaatgccagttttaaatgtaaatttcagagcgtttaacttatatgcagaaccactgaaattacacaattggtgtttgtgacttgttggccagaagagacaaacacaaaccaaactcataaagattggaagcaggaagacaagttgcctccaggtttgcccaacggggatgttctttcaggcctggacatactggatgagcggggggagtccagacccttccaggcatccaagggccctgtcagccaccagacacatgcactgagacccagccagggaggcaggatctagggaaattggtccagctgtctcccctttccacagccttccccagccagccacagcagactaacctccaaggatctctaaacctctgtgctatgacaccctcagtacctgggctaggggtgggcagaggtttgcccccatcgagaaacagcctccggccggccccgccacatacactgtgtgctgccagcctagggcagggacggccaccaccatgccaacccgagatgctgcagggtgcatgcaccctatcctggccctctctgtgcctgtacccaggaccctgtgaagtgtggacagcaacagtggccataggtcagggcagaaagggggaagccaggtggagagcacaggcagctgagagctggtcgtgggaggcagccacaggtggagccatgcataagccaggcttccaaagcacagattcaaagataaagttacgtccgggtgcagtggctcacgcctgtaactccagcactttggaaggccgaggcaggcggatcacttgaggtcagaagttggagaccaacctggccaacatggtgaaaccccatctctactaaaaatacaaargttagccaggcatggtggcagatgcctgtaatcccagctatttgagaggctgaagcaggagaatcacttgaacccgggaggtggaggatgcagtgagccgagatcacaccactgcactccagcttgggcgacagaaaaagactctgtctcaaaaaaaaaataaataaataaaagataaagttatgaagactctcaagacagcgccacagaggattaacccccgcacagagcccttttcattggtcacttgctcagccagctgccccagtggcctgtgatgggagtgggaagtgtggggttgggtgataaccttctaaagttagaaccgttcccagaaatgcagacgggagagctttgggaaaaccatccaaaccttgttattttttatgacaaagtaggaatgccaccctggccctctaaattcataaacagtcacagacatgggattaaactacatataatttctgcaacgtggcttataggcatcattaaacagctgcaatatgttgaatggctatgtcatcatagattagctacgatactggctatggacttcaagactccatgtgtcctggcccctgcccttccacccctctgacccgagatgcagttctaacaggttcccgggtgatgctgctgctgctgacccttgcccatcccggagctcactttgagagctggctgagatcccaggcagggtggccagtggctgctccagggctgtgaagggctccccctgcagacggaggaactaggcctcccagygcctgtaactggaacgttggcggcttgagaatggacttgccctgaaggccggcctcctgctgctctgggaaaaagagggaacagaagaaagcaatccgccaccttggggactcctcctggattagcattatctaggtgaagaaagtgagaccatcacctaccaaccagataactcattccacctctgtgggcaaactggcagagcagcaaataagcttccttaatcccagtgcgcccacaccctgctcaagagctcatgggcacgtgttcatcttcaggccaaagatggggagccagggagtgacagactgtcactccaggagagtcacccgggggtgttaggatccccacatttgcaccccctgaaatctaatcagcattttccagctgttcctaatctgacctgtgcaaatggaatctcattggaacttgcatttttcattatagtaactcatatggcctctgtgtttcgcctgttcatagcctttgaccatttttctagctagttgtcttttcctactgactgatagtagctctttggtttttgttactgttagtcctttatagatgtggcaaacttttttatttgctatttcactatttgccttttgacttcataatgtgccatgactacccatgtgacaggctctttgagcctcagttttctcatctaagagatggggaaacagtcaccacactggcttagtggagcatcaaatgcggtaacgtctatgctgcacttggtcggccacatcgtcagctcccaataaatgctggcggctgtggttgccgctgcagttttataaccaaacttctctgtattacgaagacccctgagccccaggctagcaccgtgaaatataagcacaatagaaccactgagcgccaatcagatgcaatttgggtcataccgactttccattttgtggggtttctgtttaaatgtttgccaaagttggaaacgagattgaaatttaaggaaaagacaaaatgctgtgagatttgggctaacacgaacttctccctttgtcacgacccctccatcagatggcccctgagttctgcagcctcraggaagkcctgccctatctggacatggtgattgcagagacgctraggatgtacccgccagctttcaggtgtgtggtagccccctcccctgcccgagtccccacctcctacccctaccccctgccccagcctgcaggtcagggccctcctccatcagttaccacttgtgtttctggagggcaacgcctgagtcctgggttcctttgtatccccatggcacctcagrtatctggcccgctttcctacaggttaacaaccttctcaaagcttcacaggcattttcttaacaccgccttcctccccagcccaagctggccctttggtctcctagcctttgctggcttttgccatttcccctgcctgttcgttcattcattcattcattcgttcattcattcattcagcaattgtttattgagcatctactctgtgccaagcattgggaaatcagctgtatataaaacagataaaagtccctgactgatcttggagctggcattcagacagtaggggactgtctgagtcctgggagctccttcctgccatccaacacccccagctgtcccatcctggagctccaacacgactcaccctccaaaacgtctcactgcccctcaagacgtctgtgttgggcttgcctcacctggtcctccctgcccttcctcctcagcactttgagctgtaactatacacttcatgttatattcttggacacatatctgccactccatgacatttcactaatgtacacaccaaccagccggtcacaccaacctgtgggtatcttgagagcaaaaccaactattgtgcttcgttcaaactctcccaaacaaggcactccatagagaagggcatcttaattcatgtccccagacccctacagagagtgaagtaacagccagatttcaggctctagaaacagaagcagcacaaagcattaaccgtatgtgataaattccactcaacacttttatgaattaacagatcacataaaccatatggaaatacctttcaccatttttaaagacaatatgtggatgatttgagggtatctcaaaacgatatttcaacacaaaagcattacaaagaatgcaattgtagacattgtccaaatgttcaagtccagaagcaaatacagaaaattccggtggcgtgattcgaactgcattgtcctcaagcacacaaggttttgggtctcagtgtggaagcaggccagtcactcaggggctctgtgccccctctccccatgccagcattaagacctgatgtgcagcccttccctgatctcctttggagcctcttgcaaactgtcatccaattctttcttttattcttttttttttttttttttgagatggagtcttgctctgttgcccaggctggagggcaatggtgtgatctyggctcactgaaacttctgcctcttgggttcaagagatcctcctgtctcagcctcccaagtaactgggattacaggtgcccgccactatgcctggctaattttttgtatttttagtagagacggggtttcaccacgttggccaggctggtctcaaactcctgacctcaggtgatctgcctgccttggcctcccaaagtgctgggattacaggcgtgagccaccaatcccagccttatttttttcataattgatatccagctttcttccaaggggattgtgggaagctggtgtacatgttaaaatgaagttcaagataaagcattcagggatcaaatagaacaaaggccatttaaaggaaagaaggccttacagggccccagagctggctggtagctggggtccagctgtggcttggtgaccagggctcctggccaagagggagagcagccaagccaaacaggtgtgttctccagcaagaggacagcacagaaactgatcaatggacacagtacttcctggacctaaactcagccacgaatccatcagacaagaccttattagctgtcatgttgaataacaaagggrttaggctcttcaacatgaaaatgcggtggccgattctccactgacccgttataaacagcagagcagaaaaggaagttggtgcaggtggaccaggaagctggtgatctcacctgaggaccagacagaaactagagaacctgggtgaagtagttagaattcatctaacaggtctagagggcacgtcagaagaccatcttggccctggccttggcatactgcgtgatcgtgagcctcatgctgctccgtgcctctccttcctacgggttaaatggggacacacacctgcttggctggccctgcagaagcaggcaagaggcagtgggtggcacaggtggaactgtagtgcccgctcagctgcctgcagcatgatgtgtgcagggaggagcgccggcactggtcggacagtggaatggacagcttccatccagcctcgctctcctgagccgccccttccccacacatgccccacacccgccccacaccttccccacacccaccccacacctgccccacacccgccccacacctgccccacacccaccccacacctgccccacacccgctccacacctgccccacacccaccccacacctgccccacacccgctccacacctgccccactcccaccccacacctgctccacacctccatacctgccccacacctgccccacacccgctccacacctgccccacacctccatgctggccccatacctgctccacacctgtcccatgcccgccccacagccgccccacacctgctccacacctccatgcccgccccacacctgccccacaccttcacacctgccccacacctgccccacacctgccccgcacctgccccacacctgccccgcacctgccccacacctgccccacacccgctccacacccgcttcacacccgctccacacccgccccacacctccacacccacaccacacccgccccacacctgctccacacccacaccacacccaccccacacctgcctcacagctgctccacacctgctccatgggcatttttcaccctatcagctctgctggcttttcttattgatcaccagatatgagagagacaaggtgtcacaattctcacccagaccagaggacaatctgcttctgctcaaaggatttgggggtgaatgtagggagagtgagcatttttattttattattttatttcatctcaaaaagcgtgttgacttttcccaagtgctgacacaacttggacttaytcataaaagaaaatcagaatcgcccttgtgggaaacacagcagccctgtctgagcgccactgaggtgactcccggatgctgtgcggtgcagttctgaagcttctgttgatctcttatgaggttcagtttacggggaagggaaggccctattttccagcttccagggggtctgcctccaggtccaggctgtttccagaaaagatgaacaagcagggtgccagggaacagcttcatctgacccctttggaactgcgggtacagacatcacaaaccccagctgcctgccctggtttcagtgctggtgtttgctatcagctccaagcacatataattgcattagcagcttagcatctcaatgggttctccacgccctggcctttttctgttcctgtctgttacatgaaaggctcataacagagagggagcagcaagaagccacaggctgcttttaatctcttacgggcaggaacagggcataacagtaattactgtaatcattgcatttcctttaggatatttagggaagtccaatcctacagcttgaagtaaaatccagcatagaattattttgaatttttaattatttatattgccaaaatagcatgcttatacaaacaaaacaaaaccaaaaaaaaaaaaacagtcccggccgggtgtagtggttcacacctgtaattccagcactttgggaggcaaggagggaagatcacttgagttcaggagttcaagaccagcctgaccaacatgatgaaactctgactctactaaaaatacaaaaattagccgggcatggtggcagaaacctgtaatcccagctacaagggaggctaaggcaggagaattgcttgaatctgggaggcggaggttgcagtgagccaagatagtgccactgcactccaccctgggcggcagagcgagactctgtctcaaaaaaarcaaacaaacaaacaaaaaaaacagtcccctaaacaatgaagaataaaaaaaaaagaaaaaaaaaggccccctgccattctccatcccaatcccatcccctagagaagagaaagatagaaatttaagtattcttctagaaatgttatgttcatatacaagcatatatagtctaccctttaaaagtaaagcataaatgagattgtgccaktgcccttgggtaaaatgaacaatctgatcaaatattttcctctctgggagaagaagctatcggtagagacatagacaacagggaacagattttcaaacccaaatttccttccctcaccaggactcactcagaggagccaaattaacaaagaaagtagaaggctgtctgccagggaccagggagaggggaggggagggagttagtgtttaagggatccagaatttcagtgggggaagaggaaaaagttctggagatggatggcagtgctggttgcacaatgaatgtactaaaaccacagaactgcacactgaaaaatggttcaaatggtccattttatgttctatatatatatatatccacaatgaaataataaacaggtgagcagataaataactaaataaacccagcctcaccaggaccaattctgatgttccaatattccagaattatcatggcatttgatggacggtttgagcctgtcctcattagatgttctcatgtcctgtgttaaggacttaagactcagaagatttttcatggattccaggcacgtgggagtggtacagacaggagcaggagtgggagcccgtgtacgggattcattagggaaacagaactttgctacgttgggagggtatctcgaggacaagccttgacagagggtgtgaccagcgtctcctcccaacccccgtgttacctgggataggaaatggcctgaagtctggaaggtaggaggcaggaagtggggcttggttttcttgctgtgagccagatctgttggagtgggataatgctgaagtcagagagagacttctcaatcgaaccctatagtcacaaaagtagttgggaagggggtgggctgagaggtgcagggaggtgataaagagaagctggggctgtaattctgccctcgtcctaaaaggctctatctcatcctttaaaatcccaaatcacctgtaaccagaactttttttttttttgttttgagacggagtctcgctctgtcgctcaggtgtacagtggtgcgatctcagctcactgcaacctcctcctcccgggttcaagcgattctcgtgcctcagcctcctgagtagcagggactacaggcgcacgacaccatgcytggctaatttgggtatttttagtagagacggggtttcaccatgttggccaggctggtctccagctcctgacctcaggtgatccacacacctctgcctcccaaagtgctgggattacaggcatgagccaccacacacccggccatgaccagaactcttgagagcgtgtgctcaacactcgaagtccaaaagtctacccaagttcaggaagagagcggttcttcacctctccacctcgaattttgtttctagaatgttgcatgtaggtctgaagagtgacagcacgtttgtttaacaggaactcaaagccagcagatcaggaaaggacacttataaggtttggagtttgggttacagaggtttaaggtaggtcttttgtggcaaggaatatttgaaattgggcaagatgagtgagctgagatcgcgccactgcactccagcctgggcaacagagcgagactccatctcaaaaaaaaaaaaaaagaaattggggcaagatgtatgacataacaatttaggaatgagtgaatacaggtaggtgagttgaagggagttctgacaggtaagactgttgtctggcaagtgaactgtttgctcacgcaagcaaaccattgtcctgataggaaagtggtttgctcagacaaattagtttgcattaatttcctgaagccaacagtgaagctgtttcttsgttcagaggtttatcttcctcggcaagaattttctggagcagagaggaagtcactgacacaggtggtctcgatgctcactccaagagttgagttgtgtggctccaggtagactcatttcccagggtcacctgctgggccataatcaacaaggtacaagcttaagagagccatgccgggatttcaagttgcaaggaagagagattcaatggtgctttcttgagtcacgggtgttggttgtaagaaactggtggggtaaggaagctagaactctcccaggaaccaggaacggctctcactggcaggcctcacggaggagacccaagctgggggactggaaggtggttcagattgttcacaagctgcagtggctccagcagtcagattggggtgtgatctcacagcaccaggagccctgaacaccagcctgaggctcagccctgaaggcagcttgaccaggcaaacctggagactgcatcaacaccagcagcctccaacacacctgacctgctcatggccttaatcccaaacccaggtcctaaactacctctcactgtgcatcgcaagtcactgcccatcttcctggcttctgatctgctgccgtccccgattcatggcctcacttcacccactgattgcccttgactttgagctacaggtttcaccagctaactgcgactctagcctcagctctggggccatacagcctcaagcacctgggtcttgctccagctccagctccctgttctaggcagcccatccttgggaagaagcagacaaaactgcatgtcagagacatggctctggttgtcatgagaagactggattgcaaagaggtcaatgagagacgagaatctaaactaaggagatggcagtaaaactggagagatggcaccatacgaaagaccagtgatgaatctgcagacggggagagacgagtacaggatggcttctggtttccggctttctcaagcctgtgtgggaaacagaaggaggagaagattctgatgacctgctgctgctcaggccgacttcgaggattctgtggaccgcccagggaagaggccgggtctgtgggtagaaattggaacctggggttcaggctggggctgaggtaggaggcttaggagataatggaagttgaatctgggagggcagacgaaatccctgggaagtgccaggatttaagaggctggtggatgcagaagagcctgccaatgagggagaaatcaaggaaagaaatgtgtgtgtgcatgtgtgtgtgtgtctgagagagagagacagacacacacacagagaatggtaaagatgatggacacaggccaggtgcagtggctcatgcctgtaatcccagcactttgggaggccgaggcaggggatcacttgaggtcaggagttcgagaccagcctgaccaacatggtgaaaccaccccccgtctctactaaaaacacaaaaattagccaggcctgttgacacacacctgtagtctgagctactcaggaggctgaggcaggagaattgcttgaacctggaaggcagaggttgcagtgagcagagattgtgccactccagcctgggtgacagagcaagaccctgtctcaaaaaaaaaaaaaaaaaaaagaagaagaagaaagaaggaggaggaggagaagaagaagaggaggaggaggatgcagcaaaaaacagcaggtgaatctgggtaaacgatacatgggtatctaatgtactattcttcaacttttctgtaagttcagaattatttcctaatgaaaattaaaacagaaaaacaaacaaaccaaagaaatgtgcaagaggaagacaatcaatgacatagacagaccaagtcagatgaagactgaggagtattcatcagatgtacccataaatattctttggggatcttggcatggggaccatccacaggagggaggggacagatgccaggcagcagggctagtcagtgaaatgggaggagagggagcgagagggtgagcaagggcaattttaagaggcttggctgtgaatgggaagataggataggctgtggcccaggaatgaccctccaggcccccactatgaaagcaatccttccaaagcagtttgcaccccgacatggggcacaagaggggccctttgtgcttgacaaatggatgcatgaagggatggatgagtacattttcatcaaggaccaagtgagcctagcctcggggctgcaggctcctgggcagtgagtggtaatggggtrggggcttggtcaccctgggaagggggctgagcagggggtcctctgtccccagcctcattccacacaccatgctgcctgcccctgatccccttcacactcagactctgcctgcccagcacgccccaagctctgctcctcatctcttctctgtatccacccccgacctggtgtttccctcagattcacacgggaggcagctsaggactgcgaggtgctggggcagygcatccccrcaggcrctgtgctagagatggcygtgggtgccctgcaccatgaccctgagcactggccaagcccggagamcttcaaccctgaaaggtgagtactgccccttttaaaaagctctgaagggatgtgagtgtgtgggatagaaatttaccagtggaggcagcagccgggaggcacagacttagcaaaattgtccccaaatagtcaaaagttatggcaattcagatagatgtttgcaagacataatttccaaaggaaataattataccattttttagccacgcgtggtggctcaygcctgtaatcccagcactttgggaggccaaggtgggcrgatcacaaggtcaggagatsgagaccaycctggctaacacggtgaaaccccrtctctactaaaaatacaaaaacttagctgggcgtggtggcgggcacctgtagtcccagctacttgggaggctgaggcaggagaatggcgtgaacccaggaggcggagcttgcagtgagccgagatggtgccactacactccagcctgggtgacagagcaagactctgtctaaaaaaaaataaataaattaaataaaaataaataaataaataaataattataccattttttcaaggtccaaactgaatccagagatttagcatttcagcagccctgcatgcaaggaacaaggcaatttcaaatgattgtcttccattcattcaagccaggacatgggatacaggattgtatttcaggtctgcactggaaagtaacggaacatcatttcctttttaaaaaacgggcatctatgccaaaacaacagcttcagctgatgtctccatgaatctaaattcacgtgatccactggttgacctgggtccccgccttccaccacctggctttggttcattgtctcctttcatttctgggctctgtgattggaaacatctgagcaggcggcccacactctggtcctcatcagaaccagtcaatatcctgtgtgtgtgatctggcaagggaagggctggcccggcaccagttgtgttttcacctttcatggctccaactgagttcagcccaagcctacgacccagtcactgggaaaacgtgagcaatgggatctacacaacaatattccacagtcagcagctcctgaacgtgccgcagccacagggcttacagcctcacaataaagcccaggggtagtaaaaagtgagctcgctgttacagaacagtgagtgccacctagcttcactgtcatgggacacacgctgcaggcaaatgcactacttggtaggagattcagcagttctgaggaagggcctccagctctccaggtactgcagcttccagtggttcaagtgtccagtgcaggggcctgcaaagcaaacacgggcaggagaggggctgccagtgtggcccaagagacctgcagggcaagccagcaggacacgccccccagggagggcccaggaggtgctgaggtgcccggtaccctgccaaggaagcaggtggcggctgggtcatcctatgggaggggaggtggcgccatgggcccaggtgagggtgatcaccaaaccctggggttcagggatgccgtgtttagactctgattgtgggyggcggtgagtctgtgggcttaytagccacacactgaattcctaaggagaggcagggagggagctgtggacattccaggtgattctgcgaattcagctctgcctctggggctgtgcaggaagacaggaggccaggagcagagagggactgaggctcaggaatgagcagccatcagctcccagagccttggagacatccttgtctcagatgcaggggtggctcagctggagcacagggctgcagaggggagggagcgggtgttctgggccagccctgaccacacggacctgcaggttcacggctgaggccmggcagcagcaccggcccttcacgtacctgcccttcggggccggcccacggagctgcctcggggtgcgtctagggctgcttgaggtcaagttgacactgctccacgtgctgcacaagttccggttccaagcctgccctgagacccaggtgaggcccccctgctcagaggcagrggcaggggcaggggygggagggccaccccagttctctgcgtgagagcaggccagcctgggggcaacatcaggctctgcctccgtgagcttgggcaagctccttaacctctctcggcctcagtttcttgattcgtaaagtgggggtgataataataacaccctctacctctcaacatcctgtgaggatccagtgagttcacacagcgctcaggtaagccctggcaagccaacccgagcacgtgttaaccattgttattagtattgttctctgcacaccagggctggacctcaccttgctgtagctcttcccacttccacaaagggcacacagacaatggcatttgcagttgtgacatgtgcctgcctttgcggggtggggggtgcatggcttgtcctacagaaggtggggacacttcctctggctcctcctgacagagcaaggtgctgtctgcttggaggggaagctgaagggtttcagctccttgaasggtacccccagctttgccttccccccttgtgcagacactcacgtgtccccatggccacagcctggtccctctcacaggtggtgacacagcctcttcccaacaacatatgccttcattcctgaggtcctagactggtgcacagaccctgtcctcacccagagagctgagctctcctgaaatggggcctcacccacttttccagccctatctcccccccacatcacacactccagaaccagcagaccaattcctcaacaggtcagggagcttatatcccctgctttcacactcacagcaaccctgcagagtaggagtgactattcccattctttagatgaggaatcaaagctcagagaggttaaataacttgcctaaggccacacagcaggactgcaggcttcgtgatggcagggacccagtctgtcatattcattgttggactttccagcatctagcttaatgccaggcgcatgacaggtgctcactcattcattcaacaaacattaatgagcaaatggataagcagccagagatgagagaaacgggggtcctcacccakatcctgcccactcccaagctctccctccttcctgacatctggctacgtctctgcacagcrttagctattccctgcctatcctgaccactgctgtcccctgcacctatcctcatgcttgtcctgccacccggaacccactgttcagctgcagacctggacaggcaggcataggaaggcataaggacacagttgacagatagcaacaattctagattgagacaggcagtgcctctgacagagaacctgggaccagctgctggtcctggaggaataatgagcttggatgggggacatagagtctgagatactgaaagtgaacgcatccacatactctgggctggagacagggaggggcagatcggcagagcagagccaaaccaagtgaggtcaaggggcagacggaggagcagccccactgcatcggggcttccacgtgtgcggggcttgtctcacttccccacgatctcaacatacagtrcagcagccagaccagtctcccaaaacgctgcttatgcctggcactccccggcttaagaaccagccaggagtcaagggctccccgttcttccttgtctgctcagacaagtgctggggcctgcagctttttcagatgcctttgagggctatggctcccacaggagacacgtacagccccaagcactaagaccctggtgactctttgctgtcacattagccactggctcatcattttactcagctccagaggaaaccsaactcctcgagtaattctttggtttttcttcaaagtccccagtccaccactggctctgccttttaagctggacataggaaagctttctggatgtcagtgaggccagaccacagcacacatgagcaggaacagcatgaagctgctttccccagagcccctgggccagagggcattgctcagttactggccagaactggagagtgagatggggaggatcagcagggacggctggagtcactgaaagataggtttggggctttgctctctgctttcttcttgtgtgaccttggacaacggacttggccttcttgaacctccaagtcttcatttgtacagtgagatgctactatctctttgacaaatattttaattttctctattttaggtaccgctgcagctagaatccaaatctgccctaggtccaaaaaatggtgtctatatcaagatcgtatcccgctgacacagaaggctgccgggtsgggggagggcacccccaaattcaaagaaaaccctaagtgtggatgttcagaattttggaaaaatgtcactgaagtgattgaaagagtgcctggcatgcaaggrtaagaggttctttacataacatttcctaaatgcttaataaacrtttgttgcacttggttttgacattgccaatggggtttgaaccagtgctctctctaaatgaagaattgctgataaataagtgaaaatgtagttttgacaaaacaactgagaatgtggggttttaaaggaagtcccaggcttgtgctgaaaggaatccatggtgcagggcacatgaggacccccaggtaagcctgtcctgatggcactagctcgtggctctttcagcttctcgtgcattgtggagttgtagagaatgacatttatcgaaagttcaacctcagcagtggttccaaagctttattatgctttgattttcctaggtagggtagtaccaactttacagtcaagtttcaatcgacagaaaaatgagagtctgaaaaatgatatactttttcttttaaagaacactgtatcggccgggcacggtggctcacacctgtaatcccagcactttgggaggctgaggcaggtggattgcctgaggtcaggagttcaagaccagtctggccaacatggtgaaaccccatatctattaaaaatacaaaaaaattagccaggctgtggtggcgggcacctgcaatcccaggtacttgggaggctgaggcaggggaattgcttgaaccagcgaggtggaggttgcagtgagccaagatcgcgccactgcacgccagcctgggtgacagagtgagactccatctcaaaaaaaacaaaaacaaaacaaaaaacactgtatattaattttgatcaaagaatcaaaatatagaggtgattttttttgtaaaaataagtattgtgttgctaagcagttcacattcaaccaagcacttgcaaggtcagtctcacgatcagccaccagcagctgcgcattcatggctgctggtgaagagccgtatcacctccctgtgcctcagagacctcttctgtaaaataaggaggctggcctcgatcaaaagaccacttgtcctctagttgacacctgagcagctttaagaggttgaatgttgtatagagaacgatcttgtagaaatctgtaagccccttatgtgacacccagatgctgacgacccacctttagaaacttcaggccattttgggagagttggcagaatgagtttccacatattcactgctgggactgctgcttccactgtttggtggtcccccatccccttcagccaggagcacccactgtatccctcaaaatcccccttggggggccccttctcttattctctggccctccaggcaggaagaggacaccccagctgcccagcactgggccaggcctgtgagtgactgctgcctcaaggtgtagggctgtcctgtggccctccccacacccttgttgccaccacctgcccttctccatcacctggcccctctgcaatgcccagcctgggactcagactcactggagaaaaccatccacccctgggaacctgtcggcctccctgcctgtcccacaatccctgacctccccacggctgccgccaccatagaacctcagcctgcagacaggcccaatggcgcactcagctccctgcttggagcacagccccacaacctgagtcctcccttgggacctccggccccgccccccggcctgtcagctccatccagcttccctcgccttcccagctcagttggtcaccaccttcagacacagtggtagaggcttcctcatgtgctggggtcactggactccagtccttctactgtgtgaggccaccaaccccacctctgcttaaatcccactgttcacatccaacaccaggtatcacagggcagggaaccgcaccgcctggtcctccaaaaaaccctcttgctagattcccaactgagtcctcacaaagattctggccaatcccacacacatacacccatgtcccagaccctaccacctcttggcaccaaacatcttgagagtcacagtcatttccaccccttcccatcacaatgcccaccctttctgcaccggcaggaacggctccctccccgtcatcaagcaatctggccatgtggctcccaccctccctagcattgctggtccaaggagttgctcttcctaacctgctttcttccaggtcacccagccatggctgccagagtcttcacagctcagtggacttttccggagcaactgagcatctcccaccggatccctctggccgccctccccatctacacccccagtgaaccagttctgctccccaaatctccccagctcccagatgattcagaagcatagaatcagttcacttacatgcaagaccttagcaacagacatgcatctgatttaatggttttctctgacacctctttgcccctgcccaactacaccatagcaggaccaatgacttaatgaaaaagcaatgagtgaaatggcaggatcagtcaggctgtgaggaaatttggagggggttctgaaaatcataccatgggcaaccatgtggctgacccagctgcwgggtgaagctgtgttgttcttgctgttcctctggtcatttaccttggctctcctccagcttgactgcacttgcctgtgttaaggtttcagatcactccaaagatggaaaaatgggttcatattcaccttggacctgagaaatacaggcaagccaactgaagcccaagcagcaagtcgccagcagacacacgtcctcaggaaggtggaggctgggcaaaaagcatgtagtgaggaccgagtagggagggctgacagcctggtgacaccagtggccccgccagcccctctgccaacagggccagaaccagccaaagcccagaagggaggctcctgtaaactgccacgtgtgagggacacacacaacactctctccacatgcacagcacattgctcagtggtgaacctgggtcttacggggcctgaaacttatctacgaattggaggaaagagaaaaaaaaagtgtaacatttgcaaattttatcaaaacctatgaccatgtgaccatattgctagggtccctcctagggcctggggaggggctccagcaagtgaggggccctgaaccttcagcttcactgtcttcttaataaatccatacgtagctcaccaagccgtgtcatcagctctgtcacagccctgataacggtctgaatgttacgacccccaaaattccaatgttgaaatcctcacccctgaggtgatagtatttaaagtagaggtgattagaccaccagggcggagccctcatgaatgagattcagtgcctttataaaagaggcccttccaccgcgtagggttacagtgagaagactgaatctatgaggaagcaggaggttgcactttatagactccaaacccggtaaataaacrtctgctgttgatgagccgtccagtcaatggtgttttgttacagaagtccaaatgaacaaaggcaatccctgactctcagaaaaacgcctggcactcagtaggtgctcaatcaatagacgcagaaaaatgagcttcagtcttcatccacttcggataaattttcttttatttccatactcttttgtgacatgtgtgrcacaagtattcaatctcacagggatgttaaaacccacactcgaagggtktccagtgtgcttaggaaatgtgggtttgcgcaatcacaggccaagcctgggggtcctcggggaagctactcctccaggtcacctgccaggtggatgcacttccttgggcaatgggtgaccctcccaggacaaggggaaccagcagggactcgatggcaccacacagcagccacctgttctgacaatgtgacacagaccaactaatgccagagcccaggagaagccacagcagagctgcctgggttggtgtcagagcaacaggcagaagtgactgtgccgcccgtgggctgtcatccaccggtggctactgtgtcattctggaaaaactatgatgccatgagactctgagaaaccgaatcactgcagagacaaactcataaaaattaaaaccaatccataaaattgtatctagaaactctgtccctggtgccaataagcagcaaagtcaacaaagagtaaaaactaaaacttcaacacattattaaaaagcaaaactggactcaactacaatcacttctggttagtccactagtgaacccaaaagtgacttaaaagtaaaaatcattattagcaagagattaagaacataacttcattgagagrtcaatgttaagagaacagttcattaraagtttctgtttaaaaagaaaaggaaaggcccaaatagccatttcaaggcagagcaggtgaaaggcctggaacactcctgtgcgctcactgtcggctgctgaacagggagcccaaggccagcaggatggagggtgtgaccgagggcttggaggaggtggtgtactggatgacatactctgggtagacctggtgtttctcaaagatcacaaagatggaggggtcggacacactgttcacgcagctatcatagaaggcgttgctccagccctccttggccggbggacggacaaaggaggcattgcccctgacgaactcgcccaccagcacccggrccaggaacatcgtgtgggtctgcgtgtcggatttgctgtagtggtgggaatatgcagcatctcgggcaaagtagctccctgaaatgacacacgagggctcagctggtggaggggcctgcagccaggaagggtcagcacactgcgaatagcgtcctggtgatgtgcaacgccagggcctctactcttccaccccgcatctccctccctccctctgtgccatgtctccactctccctcatgaagtcacatgcatcagtgataccaacacccttctgagtggcagcatctgaggagttaccaaactgagatagcaaattcctttcaagttccggatctgccccacgaaacctaaaggcctgtggacacgtcactacttaatcccccaaacctcagattcctcaggcataaaatggggctgttcagcccaaccttacagggttggcatggaaaatgaatgagatcccatatacggaagcagtctgtagactctggcagcccaatgtatagaattatgagccttgtcaaatggaaatctgagttagaagctgtcacctgtacatttaaatccacaagtctaccactggctgctgtccatcttgaccccttgccatcgctgcctcagacggaaactgactaacaaagaactgatggacccggaacatggactgctgggcagaaaatgttctcaacttggtaagcatattgtggttacagaagataatgtcctgttcttgggatgtgttaaagggtgaaaggagacaatatatgccacctacctgaaaatggtgcagaaagagagagggagagagaaagagagaagtggcagcatgttaaaaccaatgaacgcaggtaaaatttacccaaagaggttttttttaattattattattccaattttcttgaatttcgatttccaaagaaatagtattttaaaattttctttggcaagtttaaaaataacagacaagaaaacactcagataactcacgtgatagctagaatacatgtttacatgagtatctctgagggtttctggtttctattctaaggaaatcaatagtaaaggcacagtcagggacttcatcagggctgggaaggtatcccctctcctctcccgtctctgtcaccatctcccagggcctctgctccacagggaagcaacaccccagcctaggcaggccaccctgcccacacctggggccaagctcctgaccatgcccagaggagcaagagcaaggatgtgactggtagctgtgcccaggtaccaccacacatggagtctgaacctgctcatcagctcaggctggtcccctcatgccctctagcagtctgttcctatgcaggggcaaagcaacatgggttttgctggtggaggccagtcatgccttacccttgccgtaggaagtgccatgaacaccacagacccgccagtcaaagttctgctggcagatggcgtccacaaaaatggcgctggtgccgtggaacagctgccgctcgtccacggccttccctccgttctgctt

SEQ ID NO: 5612 - DNA, 75007 bp, Homo sapiens
ttacatttttgatctaatttttaaaaatgttttaccatgctgcacgttagacagccagggacccttagtaacaaggcacaggagccggtgtgtatccagcccttgctgtgcagtgggcactgtgtggtcatcagcgtgtcactcatagacactcatttaatcctctcaaaatccgtaagacgtagtgacacaaacatctccattttacggtgaggatgtagagccctagagagcctgagtaactgcccctgcatcacgcggctcctgagagttgggagctgggattggaatcccacagtcagattctagaacccataccctggcgccgtagttcagcctctcagcccgaattaccgtcattatcgtaacggctgtagcaggtggcattttttttttttttttttttgagttggagtctcgctctgtcacccaggctggagtacagtggcgcaatctcagctcactgcaagctccccacctcccggattcacgccattctcctgcctcagcttcctgagtagctgggactacaggcgcccgccaccacacccggctaatttctttttgtatttttagtagaggcggggtttcaccgtgttagccaggatagtctccatctcctgacctcgtgatccacccgcctcggcctcccaaagtgctgggattacaggggtgagccaccgcacccggccaacaggcagcatttcttgagcacttactgtgcccgggtactgttccaagcactttgtcaacttgtttaatccttatgacaacccatcgttcggccccgtcatgtggatcaggaaacagtccagagtggaggagggaggagactgagcagggggtcgctggggctggaccgcaggagtctccatcccgcttccgcaggtggatagtgacaagggcatctcccttcgcttccctcggtttattcgagtccgtgaagacaagcagccrgagcaggccaccaccagtgctcakgtgaggtcctgggaagcaggggtgggccgcccagctgcttggccctaccagctttttagcgtggtggcctctctggaaccttgtggaggtgggagcagccagggagcttctgaccaccccgtcccaccctctctccgcaggtggcctgtttgtaccggaagcaragtcagattcagaaccaacaaggcgaggactcaggctctgaccctgaagatacctactaagccctcgccctcctagggcctgggtacagggcatgagttggacggaccccagggttattattgcctttgctttttagcaaatctgctgtggcaggctgtggattttgagagtcaggggaggggtgtgtgtgtgagggggtggcttactccggagtctgggattcatcccgtcatttctttcaataaataattatcggatagctactttgtgacagggtctgtgctgggctctgggggcaaagctgtcatgggtgtcacctgcatagcatgtagccatgtagccatggcctaggaactgccagagccagtgccagccatggaactgcctgcagtggtgggcgtcttctctatctgctctgtgcagtgtgaccgccactggccacctgcaatgcccgagcccttgacaggtggccagcatgacagaggatgcgaatttgttttgttttgttttgttttgattttgttttgagacagagtctcgctctgttgcccaggctggagtgcgatgatgagatctcagctcactgcaacctccaccttccgggttcaagtgattctcttgcctcagcctcccatgtagctgggattacaggaatgtgacaccacgcctggctaatttttgtatttttagtagagatggggtttcgccatgttggccaggctgatcttgaactcttggcctcaagcgatccaccctcctcagcccccctaagtgctgggattacaggcgtgagccaccacacccagccataccaaatattttatttaattgtattggacagcagtagtctaaaatctttacatacatatatttttttaacttgtttaaccttccagccatcccacagggaggcaccatcgtgagccctgttaaggaagacaaatgcagtgtcttaaaataacacagatgtattccctaaacagtttcggaggtcagaagttcaaaatcagttttactgggctaacatcaaagtggtggcagggccggttccttctgggagctccaggagagaaactgtgtcctttttccagcttccagaggccacctggttcctaggctcatggcttcttcctccgtcctcaaagccagcagcatcgcacctgcaaatctctctcctgaggtcatcaggtcacgtcctctcctccatcagatctctgtttctctcttccaagtactcaagtggttacatttagggccccctggatgatccaggataatctcatttcaggatcctaactcaatcccaaagtccctttagtcacataagatcacacattcacagaggccaggcacagtggctcacgccttggggaggacttggggaggctgaggtgggaggatcacttgaagccaggagttcaagactagcttgtccaacacagccagacttcatctcctctaattttattaataaaattaataaaaatgtaaaagggccaggcgcggtggctcacgcatgtaatcccagcactttgggaggctgaggcaggtggatcacctgaggtcaggagttcgagaccagcctggccaacatggcaaaaccccgtctctactaaaaatacaaaaattagctgggcatggtggcgcgtgcctgtaatcccagctactagtggggtgaggcaggaggatcacttgaatctgggagacaggttgcagtgacccgagatcgtgccactgcattccagcctgggcgacagagcgagactccatctcaaaaaaaaaaaaaaaataggtcacatcaaaggtttcagcgattaagacctggatatctatgggggctgttattattgcagccaccccacatgggatgatatgttagaggaaaaccatcgggaaatggtcagacaaggcaagcaggatgcctggaacacccacccagccctgggcaccacggggctggcttggggaaaacggctgcacgcggagcggggcccaggctcgggtcttccagagcaggaggcctctaaccccggggcccagcgtggaacaggagcttccgggcatgagagtgtcagggtgtcctgatactcccgcaggggggacacagggctcccagctgtcccctgcccctcacactctgtttctgcctctcacatctgccctccctccttcccttctctctcatcaggttcctctgcccttgtctcccacccgccctctctccccttccttctctatctgcgaggctttgctctctgccgtgcaagtctgtgccaggcttactttgctgtctgtcactgtgactcakcctccctgtctctcttcctgtgtctccatcatggtctcttgtgcacacaatctcttgggcattctgtttctatttgttgtagcccaagaagacaacattgccttccgagtctccttggggctagcagtggccctgtagccctgtgtgggcagacccaggggacataagcacaggggctgctggggacttctggagaaacatctttcctgaccaaaaaggacagccctggttgtggcagctcctcccctcctcctgccttgactagagatgatggctggagccaagtcaccaccttgtaatgatgaggaaaaagagtaacaaactctcctgacgaccctaaaccggcgaacctagggcagcagctgcctaactgtgggcttttgttcatgggagtaggggaagaataagccccagggcgattatgccactctaaaacatggctttcagccgggcacagtggctcatgcctgtcatcccagcacttcgggaggccgaggcgggcagatcacctgaggtcgggagttcaagaccagcctgaccaacatggagaaaccccgtctccactaaaaatacaaaattagccgggcgtagtggcacatgcctgttactcccagctactcaggaggttgaggcaggagaatcgcttgaacccgggaggaggaggttgcagtgagccgagatcgagccattgcactccagcctgggcaacaagagcaaaactccgtctcaaaaaaaaaaaaaaaaaaaaaagacttgtttctcatagctaagagttcctgatacagctctgccttaaagaactggcaaattagtgtgcatttgtgtttcaatttcaaataaaatgtttaaggcaaaaaaaaaaagtaaatgttgtatgtcaggggatccccacattactggctttgtgtggagaccatggttcctttgggcttggctcttcctccctgcaccagtgcagggccccaggaacacatctgccacacacggccgccatgtccctctgctgaagctagtcagggtcatcctcactcctcagtgaccctcatgatggctccaccaggtaggtacttttattctccccatttaacaggtgaggacactgaggggcacagggatgtaagttaccttccctaggtccactatctaggaagtggtgggccagggtttggtccatgctgtcagctccttgaccctgcatctataactactaactatactatggagagcctcatgagctcctgcgaggtgtagaaccttatcccgcaggcggggcagtggcatggtcaggtctaggagtgaaaagatcctgcgatggttggagttgcgggcactgaagaggtgagcctggcgttagggggagcaggggagaccatcttccccctggtgaaatcctgttctaaaattggtgatactcctgccttggcctcccaaagtgctaggattatggcctcatatctatttttaaaaaataagaattcaagctgggtgcggtggctcgcgcctgtaatcccagcactttgggaagccgaggcaggtggatcacttgagttcagcagttcgagccagcctggccaacatggtgaaaccctgtctctactaaaaatacaaaaataattagccgggcgtggtggcagatgcctatgttcccagctactcgggaggctgaggtaggagaatcgcttgaacccaggagacggaggttgcagtgagccgagattgcaccactgcacaccagcctgggcgacaaagagtaagactccatctcaaaaaaaaaaaaaaaaaaattcaaaacccatcgagttgggatgacgcttagtgctgggcttcaggaagagtaggcaggagggtagtatgggaggtttctaggagccactcttggaagcggtgctccccacagatgcccgattgcactgactggaactcggtcacatgaccacataactcgctcacatgaccacacctagctgcaaaggtgctgggaaatgtggtaccctgttgggaggccacttctgggcttcaaaccttcactgtgaatggagctcacaggttttctaaaaatggacattaaatgaaccagagttggccctaaggatctggctcactgcaacctccacctcccaggatgaagcacctgcctcagcctcccgagtagtagctgggattacaggcacatgccaccatgccgagctaatttttgtatttttagtagagaaggtgtttcaccatgttggccaggctggtctcgaactcctgacttcacatgatccgcctgcctcagcctcccaaagtgctaggattacaggcgtaagccaccacgcctggcctcaatatttctttttctgggtatttgagtatgatattatatatgatggttattagacagccagatgcataggaggattagctaatctgttttgaggaatacttatctccaatatagttatataacgacaacattctttttttgaatactggtctcgggtgcctaatgacagaagggtgacatcactaaggaagcctggaaagtcccagccctccacgtgatcccacggatgaaaatagctccgggtgagctctggaacagctgaaaaagctggagcaaccaagcagggcctacaagccgaggagggctgtttaaaggcgcaggggccattttaccctccaggttggccctgctcaggaccaggaggaaacacctccagcccgcgacctcctcccacagggggaaaaggaaagcaggaggaccacagaagctttggcaccgaggatccccgcagtcttcacccgcggagattccggctgaaggagctgtccagcgactacaccgctaagcgcagggagcccaagcctccgcaccggattccggagcmcaagctccaccgcgcatgcgcacacgccccagacccaggctcaggcaagccgtgggggcagggagggctgtttcatcccgctggggcggccataaccaagtaccagggattgggtgcaattaaataacaggatttctttttcttttttattttattttattttatttatttatttattttttttgagacagcatctcgctctgtcgcctaggctggagtgcagtgacgcgatctcggctcackgcaagctccgcctccggggttcaagcgattctcctgcctcaacctcccgagtagctgggattacaggcgcacaccaccacacccggctaatttttgtatttttagtagagatggggtttcaccatgttggccaggctggtctcaaactcctgaactcgtgatccaccccactcggccttccaaagtgctgggattacaggcgtgagccaccgcgcccggctaggaatttattttctaacacttctggaagctagaagtccaagatcaaggtgttggcagggttggtttctcctgaagcctcttgcagaggccctaatctctccttataaaaccaatcaggctgggcgcggtggctcacgcctgtaatcccagccctttgggaagacgaggcgggcggatcctgaggtcaggagatcgagatcatcctggctaacacagtgaaaccccgtctcaactaaaaatacaaaaaattagctgggcgtggtggcgggcgcctgtagtcccagctactccggaggctgaggcrggagaatggcgtgagcccggaaggcggagcttgcagtgagccgagaytgcrccactgcactccagcctagggcacaaagcgagactccatctcaaaaaaaaataaaataaaataaaccaatcaaaccaaattccaggccaccctcaggaccccactttaacttagtcacccctttaagagcctatgtctggccgagtgcgatgactcatgcctataatcccagcgttttgggaagccaaggtggaaagctctcttgagcctaggagttcaagaccagcctgggtgacataacaagacctgatctctacaaaacataaaaaatttagctggagatggtagcatgtacctgcacttccagctactcgggaggctgaggtgagaggctcgcttgagcccaggaggctgaggctgcagtgagccacgatcacaccactgcactccagcctgggtgacaaagcaagaccctgtctcaaaaagcaaacaacgaaaaagaatcctatgtccaaatacagtcacattctgaggttctgggggttacaagtccaacatatgaatttggaggtggtggggggaagctgattaatttcataaggggggtcttgaaactgccttcgcagaaatgtaagtaatgagagaaagctaacatgactgaccatcttgtttctaacctcacaggctagatttttttttcttattctagtgcagaggccaaaattaccatgagaggaatttaattcatagttaaactttgagacaaagaaaactgacccccagtccttgttgagagattgaagccacattcatttactttttatttatttatttakttttgagacagagtttcactcttgttgcccagactggagtgcaatggcatgatctctgctcactggcacctccacctcctgagttcaagtgattctcctccctcagcctcctgagtagctgggattacaggcgcccgccatcatgcccaggtgacttttgtacttttagtagagataaggtttcaccatgttggccaggctggtctccaactcctgacctcaagtgatcctcccacctcggcctcttaaggtgctgggattacagccatgagccactgtgcctggcctgaagtcacattcataagacaaggttagaatcatgaaggtgctggaactttgctaaagaacagtcgtgggttgaagaatgacctgccatyccttagcttccttttctrtatgtgctccagagtcacgtaaccaggggtcgcatgatttataacttccccagctacttctataaataatatcactgtcgtgaaacacagaactcagctttttagtggggtgtggtagctaacacctgtaatccccacttcttgggaggctgaggcaggaggattgcatgagcccaggagaatgagaccagcctgggcaacatagtgagacctcaatctctacaaaaaaattaaaactttgccagacgtggtggtgcatgcctgtagtcccagcaacccaggaggccaaggcaggaggattgcttgagcccaagagttggaggctgcagtgagctatgattgcgccactgtagggaccagccctgcagggtctgtgggtctttctccccatgtgcggagacgagagatcgtagaaataaaaacacaagacaaagagatagaagaaaagacagctgggcctgggggaccactaccaccaagacgcagagaccgatagtggccccaaatgcctggctgcgctgttatttattggataataaggggcagagtaaggagtgtgagtcatctccaatgattgataaggtcatgtgagtcacgtgtccactggacagggagcccttctatgttaggtagccaaggcgtagagagagaggatagcttatgtcattatttcttttatgttcttttcagaaagatcaaagactttaatattttaatactttcactaattctgctactsctatctagagggtgcagccaggtatacagagtggaacaggaaagtgaaacaggagtgtgaccactgaagcacagcatcacagggagatggtcaggcctctggataactgcgggcgggcctgacatcactcaggccctccacaggaggcggtggagcagagtcttccctaactcccccggggaaagggagactccctttcctggtctctaggcactgacgcaaccgctagaccaaggtccgctaggcaatgggcrtcttcccagacgctggcgttaccccaagaccaaggggccctctagtggccctattcgggcatgacagagggctcacacttgtcttctggtcactcttgacctcaagtgatctgactgcctcggcctcccaaagtgctgggattacaggcatgagccactgctcctggcaataatgtttcgttttgtttttrttttaaaaaaaagaaattgtctttgagatagttttcagagtgagcattttggcagaccaagagctaccacctggtcctgagacccgctcccaggaactgactcagctatacaaagatagttttggacacacctgtgatttcatccatagccgatcaattgttccctcagccccttgcccaccaaagtttccttaaaaaaccctagtctcaggtcggacgcggtggctcgtgcctgtaatcccagcactttgggaggccaaggcgggtggatcacctgaggtcgggagttcaagcccagcctggccaacatggagaaaccccatctctactaaaaatacaaaaattagccgggcatggtggtgcatgcctgtaatcccagatactcaggaggctgaggcaggagaatcgcttgaacccgggaggcggaggatgcagtgagccgagatcatgccaatgcactccagcctggtcaacaagagggaaacttcatctaaagagagagagacagacagagacagagacagaggcagagaaagagaaagagcgaggaaaaaccctagcctccaaattttcagagagacgcgcttgaaatatttctcccattctcctcgcttggccgcccctgagattattaaactctctctctttgctgcaacacctgctgttcgcattggttttgtctgggcagtggacaaggagaacccatgagcccgtgacagtcccagccctcccccactgtctttgctaagcccaacagtgggcacaggactaagaagagccatttctttggcaggaggactgagaattttctgaccgcagtgcaccatgggaaggtaagtcctcttagagctgaccactatggggaagcagagcatttgtgtaatggaatgcatagtragtgtcaagaggtgagggctgtgacagttcctctcgcttggtggagatagatggaaagagctgaaggttgggcatggtggcccatgcctgtaaccccagcacttttggtggccgaggcaagaagatctcttgagccccagagttcgagactagcctgggcaacatggtgaaaccctatctctacaataaaagaaaatatttttaaaaattagccaagcatagtggtacacacctgtagtccaagctacttaggaggctgagacatgaggatcacttgagtcccggtgttcaaggctgcagtaagctatgattgcaccaccgcactggtggtgggcaacagagcaagaccctgtcttattgttgaaccggggaggtggaggttgcagtgaactgagattgcgccactgcactccagcctgggcaacagagcgagactctgtctcaaaaaagagagagagaaagagaaagaaagaaagaaaagaaagaaagaaagacagaaagaaagaaagaaagaaagaagggagggagggagggagggagggagggagggagggaaagaaggagggaaggaaggaaggaggaaggaaggaaggatggaaggaagggagggagggagggaggggagggaaggggagggagggagggagggagggaggtatgtcaccatgttggccaggctggtcttgaactcctgggctcaagtgatccacccacctcaccctcccaaagtgctgggattacaggtgtgagccaccgcgtctggccccaaaattaaccattttgaaaagtgaataattgactggcattcratgcattcacagtgttgtacaaccatcacctctatctagtttcagaatattttcctcaccccaaaaggaaaccatgtacccgtgggctggtggctacctgcttggacagcccagttctaggtcaaattctgtgttttatcccttttccctgtgaattttctggacttctttgtgttttctcctgggaagctctgaagtttccataattcctgggctccagaaagaagaaaaggcggccgtggagagacgaagacttcatgtgctgaaagctctgaagaagctaaggattgagsctgatgaggtaagtgaggggaggagggtgsccccagagatcccagaatcgccccctctgtgcccagtgtccagggcccaactcagccagggagagctggaccgaaggatatgaacttctatgggayagaaatagaaggatatgaacttctatgggacaggcattgcccctgcctaagggagatcctaggtctcctccttctcctcctcctcctttctttttcttttcttttctttcttttttttttttttttttttttgagacaacgtctcgctctgtcacccaggctggaatgcagtggcatgatcttggctcactgcaacctccacctcccaggttcaagctattcccctgcatcagcctgctgagcagctgggattacaggtgtgtgccaccacacccagctaatttttgtatttttagtagagatggggttttaccacattgaccaggttggtcttgaactcctgacctcaagtgatccacctgcctcggcctcccaatgtgctgggattacaggcgtgagccacggtgcccggccccaggtacccttcttcttgttcccacctccatcctcaggctctaaacctctgatcgattttctccccaatgcctaggccccagttgttgctgtgctgggctcaggcggaggactgcgggctcacattgcctgccttggggtcctgagtgagatgaaagaacagggcctgttggatgccgtcacgtacctcgcaggggtctctggatccacttggtaagcatcactcatgtttcagattgctttctgacacataaatgggattatttttttcctcctgacaccaaatgtgtgtggttttttccaacgctgcttctcgagctctctggtactarctgggtgtcctacaattctgagcaattctgacgctggctacctggagttcacatcagattccacaggtgaaaggggctcagtcccaaaaaactgctcccacttcagacacgagttgcaattacctagccgctggtgcttctgaccgactggcaatagtttggggtttcccacagcttccgcctcatgttcaataatttactggaatagctcacagaactcaggaacacactttacttacaattgctggtgtattacaaaagatgggccaggtgtggtggctcacgcctgtaatcccagaactttgggaggctgaggcaggaagatcgcttgagtctaggagtttgagacccaggcggggcaacatagcaagaccccatctctacaaaaagtgaaaaaattagccaggcgtggtggtgcatgcctatggtcccagctactcaggaagttgaggcaggaggattgctttagcctgggaggctgaggctgcattgagctacaatcacaccactgcacaccagcctgggtgacagagagaccctgtctcaaaaaaaaaattttttttttctaaaaaagaaaattccaagggttttaggaactctgcaccaggaagcaggggaaaacaccaagtatctttctttgctacacaaagccatggacaaagcataataatactaccttctgacattaaaggaggatttacatgttcaggtgcacttttcacactgcaggtggatagaatacagcccttttaacttatcagcctctatgataaagtattgcattaatccgtgtaggactgtctcattcaggaggccccagatggcaggtatgaaacactcatgtctgcatgtttgttgccaagcccagggcagacatgactaatcgatcttggcacattttcagagcaggaggtaaggctaggcagagcagcagaggctcgagtgtgagataggcagggcagaggcatgaatgttgagcctggctggcctgatttgttttcatttctgtgctcaaagtttgatctggagctgggttctgagctggatgtggaggatgaggttcmtggaggcgacagcatgaagagcagagctgcagagcttgggagtgggaaaggtcctgcagagtcacaccggacccctctattcctccaaggctcatctaacatgttgagtgacatggcgtgggggtttagcygtactgcacattgcagaactccagggggcgctattgagataggaaccccatgatttcttctggaatctttccgagactgctgtggttaaaaaggcaggcctggctggacacagggactcacacctgtaatcccagtactttgggaggtcgaggtgggaggatctcttgagcccaggagttcaagaccagcctgggcaacatagcaagaccccatctctacaaacaacaacaacgaaagccttatatttcaacagctttgggttagttcctggagctgtcctttgtgggctgttacgagcccagacatacttctttgtgccttggtttcctccgctgttgagcattgtaagtgtggacgatgaagactgggaaaggatgtgtgtgaggaggtccttcacaggaacgcctgcctcatggagagggcgacacacagaggaaatggaaaatttacatgaaataaatataactgcagaacggtcaagttcaaaggagcactcaaaatcatctgggacagtccttccatttcacaggcaggaaaatgagagcacgatgggagaaaggcctcatcagagtcaaatgttttttgcagccagcatttattaaaggtttacatgtgacagcaacaaactgtgctgatctcacaggrctgtttgagaattaaatgatgaaacacatgcaaatcgtcccaacctgagctatcaagtagagctatgtaacatgagccacatctattctatcattttaaattttctttctttcttttcttttctttttttcttctggagacacagtcttgctcttgtcgcccaggctggagtgcagtggcgcgatcttggctcattgcaacctctacttcccaggttcaagtgattctcctgcctcagcctcccagttagctgggattacagacgcgtgccaccatgcccagctaatttttgtatttttagtagagacggagtttccccgtgttggccaggctggtctcaaacttctgacctcaggtgatctgcctgccctggcttcccaaagtgctggaattacaggtgtaagccaccatgtccggcccattttaaattttctagtagcctcttcaagaaggtaaaaagaaacagtgaaatgatccattttctttaacccaatatatccaaaacattagcattttgacacatcgttaagaaaaaaattgttaatgagatatttgacattccttttgtcagactaggtctttgaaagctgctgggcgttttatactgagcgcattccaagttggatgcagaagtctcattagatgttaaaggaggcccggggcagtggctcacacctgtaatcccagcacttcragaggccgaggcaggtggatcacctgaggtcaggagtttgagaccagcctggccaacatggtgaaaccctgtctctactaaaaatacaaaaattagctgggtgtggtggcacgcacctgtaatcccagctacttgggaggctgaggaaggagaatcacttgaatccgggaggcagaggttgcagtgagccgagctcgaaccactgtacttcagcctgggtgacaagagtgaaactccatctcaaaaaaaaaaaaaaaaagatattaaaggaaagaacttttcatacccagcttgttccaaacatacttcagagtttcccaataactgaatggagtaccagtgtttaaatttaagctaattaaaatgaaataaatattttaaatcatgctagccacacttcaggggctcaagagctatgatgtatgtttaatacattggatggtgtgagggtagatagcaccygataagcagcattaagaacatcaaaaatttttattgagcccgggcacggtggctcacacctataatcccagcattttgggaagctgakgtgggaggattgcttcaggccacaagtttgagaccagcgtgggcaacatagtgagactccatctctacagaaaataaatttaaaaatgagcagggcatggtgatgcacctggtgggtagtggtcccagctacttgggaggctgaggtgggaggatcatttgagcctgggggtttgagactgcagtgagccaagatcatgccactgcactctagtctgggcaacagagcaagacctgtctcaaaaaaaaaaaaaaawatatatatatatatatatatagactctatgtgacacaccagctcccttgccttctgccatgagtagaagctttttgcaccatgcttcttgtacagcctgcagaactgtgagctaaataaacctcttttctttataaattaatatatataatatatatttattgagtgaacaaatgaatataaagtcttttttttctttttttttttctttttgagatagagtcttgctctgttgcccaggctggagtgcagtggcgcgatctcggctcactgcaagctcagcctcccgggttcacgccattctcctgcctcagcctctcgagtagctaggactatagtagctgggactgcaaccacacccagctaattttttgtatttttagtagagacggggtttcaccatgttagccaggatggtctcgatctcctgacctcgtgatccgcacaccttggcctcccaaagtgctaggatcacaggcgtgagccaccacgcccagctttttttttttttttttttttttttttagatggagtcatgctctgtcgcccaggctggagtgcagtggcacaatctcagctcactgcaacctccgcctcccgggttcaagcgattcctctgcttcagcctcccgagcagctgggaccacaggcgtgtgccaccatgcctggctaatttttgtgtttttagtagagacagggtttcctgagtatccggcactagaggtacccaccaccacgcatgccatcatgcctggctaatttttctgtatttttagtggagacggggtttcaccatgttggccaggctggtctcgaactcctgacctcaggcaatcctcccgcctcgtcctcccaaagtgctgggattacatgcatgaaccaccacacctggccccgttcattgattttctaggattatgtgagttaataggtataaaagactaaagacagtttgttgctgtcacatataaaccttttaataagtgctggctgcaaaaaacatttgactctgatgaggcctttctcccatcgtgctctcattttcctgcctgtgaaatggaaggattgtcccagatgattttgagtcctccttcgaacttgatcrttctgcagttgtatttatttaatggaaattttccgtttcctctgtgtgtcgccctctccatgaggcaggtgttcctgtgaaggacctccttgcacacatctttccccagtcttcatcgtccacacttaaaatgcycaactcactctcttcctctgtcctccagggcaatatcttctctctacaccaatgatggtgacatggaagctctcgaggctgacctgaaacatcgatttacccgacaggagtgggacttggctaagagcctacagaaaaccatccaagcagygaggtctgagaattactctctgaccgacttctgggcctacatgkttrtctctaagcaaaccrgagaagtaagtcattcccagctggggacctggggtgggggtaggagcaaggggtctcagggtgtggggttaccaaagatgctgaccagcaccaccttttaagtccttcaggattttcaagtcatcaaaatctgggcacttcggttgatgcctcaaaactaaagtatatcaggattactgtggttgcaagtgacagaaattgactctgattcgtttatgcaacaaataaagtgatatgatttactagaaagatacacagacatccagggcaagaagaacaatgaggacttatgatggaataaggcagaaatagggaaagtgtcagacccaagacaactttcctctccatctctgcttggccatttgatgtcttgaattcactattttattttatttcattttatttttgagacagggtcttgctctgtcacccaggctggagtgcagtggygagatcatggctcactgcagcttcgacctcctgggctcaagcaatcctcttgcctcagccttttgagtaagctggggcaacaggcatgcaccatcrtgcctggctaatttttaattatttttttttttgtagagacagggatcttgctatattgcccaggctggtctcaaactcctgagctcaagcaatcctccaactactgggttcaagtgatcctcctatctcagcctcccgaagtgctgggattacgtgtatgagccactgcatccagcctatcctaacacwtcgggtttttgttgttttttgtttgttttgtttattcttgagacagggtttcactctgtcgyccaggctggagtgcagtggtgcaatcacagctcactgcagccttgacctcctgggctcaagcaatcctcycagctcagcctcccaagtagctgggactacaggcacrcaccactgggcctgacaaatttttttttttttttttttttttttagagatagggtttcgcttttttgctcggggtggtctccaaatcctgggctcaagtgatccttccacctcagcctcccaaagtgctgggattatgggtatgagccactgcacctagcctatccaagcactttgggtggctgaggcgggaggattgcttgaagccatgagttcgagaccagcctgggcaacatagcaagagcctgtctctatcaaaaaataaattagccgggcatggtgacatgcatctgtagtcccagctacttgggaggttgaggygggtggattgcttgagcccaggaggttgaggctgyagtggcccattattgtaccactgcactccagcctgggtgacagactgagacccctctaaaaaaaaaatgtggcctacgtgcagaggttccaccctstgggacccacatgcctccctcacactgtcttggcacmttctcccaaagctgcyggagtctcatttgtccaatatgaagaagcccgtggaagaagggacactaccctacccratatttgcagccattgacaatgacctgcaaccttcctggcaggaggcaagagcaccaggtaagcaaacatttagagggagggagaggtartaagggatggaacrgcacrgagtggaatggaagaatgtttccctgccctccccttggggagcccaggaagagggaagggctcaggattgcagaaaacagggtgctcagcttagacgagagaagagggaagtcccagaagtgaccagaggacatgcacttgctttgcatggatcaagaaaacctttaagaggccaacatggtggctcacgcttgtaatcccagtggtttgggaggctgaggtgggaggatcgcctgaaaccagaagttggagaycaccctgggcaacatagtgagatcccatctcaaaacaacaacattaaaaaacmaaacaaaacaaaaaaacacaataaattagccaagcatggtggcaggaacctgaagaatctacccaggagactggggcaggaggatcactggagcccaggaattcaaggcttcggtgagctstgattgcaccattgyactacagcctgagtgacaaagtgagaccctgtccccccaaaaagaagaaagaaaaaagaaaacagaggagaggagggacaaaagamaaaaaggggccgggcgcagtggctcacgcctgtaatcccaggactttgggaggccgaggcgggtggatcacgaggtcaggagatcaagaccatcctgrctaacacagtgaaaccccgtctctactaaaaatacaaaaaattagctgggcgtggcggcgggcgcctgtagtcccagctgctcgggaggctgaggcaggagaatggcrtgaacccgggaggcggaggttgcagtgagctgagatcgcgccacagcactccagcctgggcgacagagcaagactccgtctcaaaaaaaaaaaaaaaaaaagaaaaaagaaaaaagtaaagaaaactgtaataagggatgtttgaaggatggcggggtgggtgggtggggctgtctctcacttttttttttttttttgagacggagtttctctcttgttgcccaggttagagtgcaatggcacgatctcggctcaccacaacctccgcctcccaggttcaagcgattctcctgccccagcctcccgagtagctgggattacaggcatgcgccatcacgcccagcgaattttgtatttttagtagagacgtggtttctccctgttggtcaggctggtctcgaactcctgacctcaggtgatccacccgcctcggcctcccaaagtgctgggattacaggcatgagccaccgcacccggccatctctcactttttagatgtcttccttctccataggtccrattatcacccaaatgctggcagctctccagacattccagtttctcttttgagctcatctctctcctgagatccagacctccttaccctatttcctaagcataaaatgcactcacttgttcagcaactgtgtcctggtaagttctcacgatacatcaggcaatgttaccagttacctgtggttgggcgtctcctggcatctcaaggctcagaagyccccagtgtgaatggtgtttgtctgtttgtttgtttgagacagagttttgctcttgttgcccaggctggagtgtaatggcacgatctcggctcactgcaacctctgcctcccaggttcaagtgattctcctgcctcagcctcccaagtagctgggattataggcatgyrccaccacgcctggctaatttttgtatttttagtagggatggggtgtcaccatgttaatcaggctggtctcgaactcctgaccttaggtgatccactcacctccgcctcccaaagtgctgggattacagacgtgagccaccacgcccggccatgaatgttttatctctctcctcggtgtggatccttgtgctgttttctcaccagagcagatacagctgactccgtcctttccataagccccacaaattcagtcattcccagacctagaaatcaccccctcctcattttcatcctttgtgctcttctacatcayccccagaccaggtctcccagtctcctgggagactcttgtaattagttcctcactggcccgcccatcccaagctgtccacctccttccctggctacctgatggaagtttccaggatgaaaatctgatcatgtcattttcttccctggaatattctaatgactcacattggaatcatgcattagatttatgcccacagacaatcctccatgcaatcgtgtggctacactcttcccttgcactccaggattccatggagttgcagccacaatgagatggaagararaggcagggctgagggttcaagctctggaaaatattggaaacaggctgctgtggaagttatgagctgccaccagcagcgtagactcaggtctgaggatgagatccccagtggtttctgataccacacagtccatctctaacattctcctgtcatggttgtaattyctcattaatagatttctttttcctgcataccygctacattcctggttctgtgctgggactcacttgccgttgtatttcctctgcagagacctggttcgagttcacccctcaccacgctggcttcyctgcactgggggcctttgtttccataacccacttcggaagcaaattcaagaagggaagactggtcagaactcaccctgagagagacctgactttcctgagaggtcagcgctggggtcagaggggattaaaagggggtgggaagtggaggagaggcaagaattttccttctgagggtctagtttgcccagctcttaaatttcttgggggaaagaaaaggacttggtaggcttccagaaagaggaatggtrtattccttctgctgagtcttcagtgtctctcaaaggtctccttaatgcggcagatacctgatatcctatcaaacaatccaggagagggagcttaatagaggggctcaagtccagggctgtggcttccaataagcagattcagaatgtgtttgggattacatggtgctttgggaggctgacctgggaggatcccttgagactgggagtttgagaccaacctcggcaacatagcaacactgtgtctctacacaagatttaaaaattagccaggcattgtggcatgtgcctgtggtcccagctactcaggaggctgaggcagtggaaggatcacttcagcatgggagttcaaggctgcagtgagttatgatcgccccactgcactccagcctggatgacagagaaagatcttgtctcaaaacaaacaaacaaacaaacaaacaaacaaaaaactagaatgtgttttgggcaccagcaaagcaaggggcatacaattttttttaaatggggyatttccagaaaaaattacaacaaaaaccaaaaacaaaacagtcatagtgagtaaaatcagaacttgattaaatgtccttgactgtagcttacacactggtatcacttttagttgtggcttcataatcttctcagcattcagggtctgaaggcattaccctgctgggcagacagctcccctacataggaccaaccatgccagcttgagaaagtcattaatgttacctgagcctcgtttttctcatagggaaagtacttacctcaaaatgtgggtgtgagagttaggtatgatccacaaataaaacactcagcccagtgtccagcacatggtaggaaattaaggatggttgactctccatgattttagcatacacttttgagacacactaggagcctgatactattttaaatgcaggggattcagtcatgagcaggacagtgaaggctcattccctaatgaagtttgcactccagggaaggagatgatgaatgaacacacacaaaaataagtatgtattataatgtcagatcatagtaaatgctatcttgaaaaataattcatggtaagggactggagagtgactacagtattatttttaattggtggtcagagcttctgacaggagatggcctttgagcatggacctgatgaaaagtgaagccatgcagatatcttagaggaaaagcatcatggacagagggaagagcaaatgcagagaccctgtattagtccgttttcatactactataaagatactacccgagactgggtaatttgtagacaaaggaggtttaattgactcacagtttcacatggctggggaggcctcaggaaacttacaatcatggcagaaggtgaaagggaagaaagaaccttcttcaagtggtagcaggagagagaagagcaagccaaagaagagctgcccaacacttatcaaaccatcagatctcgtgagaactcactcgctatcacgagtacagcatggggggatctgcccccatgatctgattacctcccaccaggtctctccctcaacatctggggattacaactcgagagatttgggtggggacataaagcttaaccatatcagaccctaagccaggaccaagtttgtcttactctagaaccaatgagaagaccagtgaggctggagcctcctgaatgaggctgagagagagggctagagaggtaggcagggtccagatcatatgggaccctgaaggacacagatgaagtttagtttggattccaagtgcgataggagagccagggaggcagtttaattagggtggtgaccgattcagtttatatggtaaaacatctcactctctctctctctctctgagcatggattaggggtgggtgtgtaaacttagaagttgggagcagttgagaagctaatggtcctggtgacagataatggcagtttaaggttgggtaccagaatggatatgggagggaagtggatggactctggaaacctggagatggatgaagaagaattacacctggattggatgtggagagtaaggagaatcagagatgacatcaaaggttccagcttctgcaacctggtagatggaggggtgttctcaggggaggagaacaaggtaggatgaaggggatcttccccttttctctggtctggacagacggggtccttcacattgccaagcctggctcctgtctcctatccccaccatctctttgctaaatctggtcttgggcatcagagattttgaaattgtcactcccaggtactccctataacattattatttccttagatgtatgtatcacctactgaagggattctgtacrtgtattttatccctcccctcacacaccagggtgctttttatttattattataaaataaacataacataaaatttgccattttaaccattttaaagtgtcaagtacagtggtataaatacaatacattcataatgttgtgcaaccatcactgccatccatctccataacacttttcatcttgtaaaactggaactctacgcccattgaatactaagtccctgtcaccccctcccttagcccctgacaaccacaatgctaccttctgcctctacgattttgactactctgagtatgacatgtaaatggaatcatgcagtgcttgtctttttgtgtctgtctgatttcactgaggaaaatgacttcgaagttcatccatgttgtaccatgtgtctgaatttcctttctttttatggctgaatcatattccattgtacgaatataccacattttgcttatcaattcatccatcgatggacacatggattgctttcaccttttggctgttgtgaaggaacctgccatgcacatgggtctatgaatatctctttgagaccctgctttcaattcttttgggtatatactcagaggtagaattgctggatcatgtatgtggtaattctacttttaaaattttgaggccaggtgtggtggctaatgcctgtaatcccagcactttgggaggccgaggcgggtggatcacctgaggttgggagttggagaccagcctgaccaacatggtgaaaccccatctctacaaaaaatacaaaattagccgggcatggtggtgcatgcctgtaattccagttactcaggaggctgaggcaggagaatctcttgatctcgagaggcggaagctgcagtgagcggagatcgcgccattgcgctccagcctgggctatctcaaaaaaaaaaaaaattttttttttgaggaacgaccataccattttccacagtggctgtaccattttatattctgcccaatggtgtcccaggkttccaatttctccacgtcctcatcaacacttattgttttctggggttttttggataccagccatcctaatgggtgtgtctwtttttttttttttttttttttttttgagatggagtctcactctgtckcccaggctggagtgcagttgtgtgatctctgctcactgcaacctcccaggttcaagttattcccctgcctcagcctcccaagtagctgggactataggtgcataccaccaggcctggctaatttttgtattttttagtagagatagggtttcaccatgttagccaggctgaytttaaactcctgacttcaawtgatccgcccacctcagtctcccaaagtgttagcrttacaggcgtgagccaccgtgcctggctgattattcattttttatgtctccctgtatcatatacaratgtgtttggctaaaagtcactaaccaaccacagtgccccgaggacatgtgggattaattttcttacaaaagaaaaagacagacygrgcaccgtgactcacagctgaaatcccagcactgtgggaggccgaggcgggcagatcacttgaggtcaagagttcaagaccagacgggccaacatggtgaaaccccgtctctacttaaaaaatacaaaaattagcagggcgtggtggtgcatgcctgtaatcccagctagtcgggaggctgaagcaggagaatcacttgaatctgggaggcagaggttgcagtgagccgagatcacaccactgmactccagcctgggcaacagagcgagatcccatctcaaaataaataaataatacaaagttaggtggctggtgacattggtttagctgtgcaacattaagcagaaggacccaggtttattctagattttctgctcctccatccttagcatattaagtcaccctcatgctgaactcctccacaccacgggatggcggctgcatccaatgaarctgcaactttttttttttttttkgaagtcagggtctctctctgtcactcaagctgccgtgcaaaagcacagtcatagcccaatacaggtcttgaactcctggcctcaagtgatcttcctgcctcagcctcccaagtagctgagactagagttgcatgccaccatacctggcctgctccttctgagaaggagaacaagcactttgcagaagtccccccagcagtgtgcatggaccagagcttgaccktcccctagctgcaagggaggctgggaaatatttgcccttcctgcctgtgtgctgagaagggttggcatggacrggagcttgaaatggccttggggtagccagtctacagtgcccggctggctccacccatagaaggttcgtgaggacaaggacyttatctgtcttgtttactgctctattccaacagccagaagagtgccgggtgcccactaattgcttcataaatatttatggaatggaagaawgatctttcttcctgctgcagatccctgcagtgctttatgccagtctgctggtgctttgaatatcaarcatgacagtcacgtgatggagaatgtttgaattttattgctcttttcttggcaggtttatggggaagtgctcttggtaacactgaagtcattagggaatacatttttggtgagtatttggggaacagaamggtcaaascctagagatattttatgcaaggagattcacagtacttttcctactcatggcagaagagagacctgtgtgtaattgttctagcaactgcttttcctgacatttattctcatataattgggcagccaggatgaccacagagtggatgagagtacagactcccttggaaggaatgttgctctggtacatgtaagctttgtgacctccgaaaagttacttaacctctctgtgcctcgktttctgcctctgtgccatgcgggtgataataacagtagttatgaatatttgatgagttaattcattgaaagcttgtaggacagtgcctggtagataacggcactcagtaaacattagcaatcattacctggtccctcatttaacatttaacccctttaataccctaagaggcagacgcttttgtcccttccattttgctgagatccaccaagtcgtgggaaggrtgcgtgactcacccacactgctggtcagtgagtgcagacgcggggatctataggagaactgggtggtggatctctaggggaatagtgtggtggttctgatccaaagcctgtctgcctggatccacatcccggctctgcttctcctgcactgctcactctggaaagctgcttaaattctctgtgacccaatttccccttcctaaaatggagacaatagtacgtagtcgcagtctcgtatatttgatgtggggtttaaatgacctcatgtatgtaaaatgcttagagccaagcctgacacatgggagtgtttcattacatgttaatcttatttttaggatcattactgagttcacaccctaaaccactcgtcattcatttaatgtatattcatgggacctcctgtgtgccaggcactgtcctagttcttacactttgactttttttgttgtttgtttttttgagacagagttttgctctgttgcccaggctggagtgcagtggtatgatctcagttcactgcaacctccacctcccaggcttaagcaactctcctcccgagtaactgggactacaggcgcgcaccaccgtgcctggctaatttttgtatttttggtagagacaggatttcaccatgttggccaggctggtcttgaactcctgacctcaagtgattcactgcctcagcctcccagtgtgctaggattacaggcataaaccaccacgcccgggctgatgttgttctttgacattggtgttcaccatagcttggttaaaaacaaamctaaaaagggaatctatctatatccaacctccaaatggctractaaaggtgtgagatgggtctgagtgttacttctccagtgggtckgctaagctttctctctaaaaaacaaaaacaaaattcctgatatgtagtgtttgccaattcctgtggtgtaaatgttcccaccgtggccaacttcaggctaccaacatgaggtcactgagcacagagttggaagagaggtgcaaaattggctctcgrgagccattggctgccattggagcccatggctgccatttctattaatgaaatatccctgcaggtcatctgtattttttatattataactagggactttgttgtacagataaacattcctcctgcttctactcttttgcagaccagttaaggaatctgaccctgaaaggtaagcatcctacttcatcatgaatccctgatgataatggggaccgcacacttgcttgaggccagccattgtcctaggaacattacatgtrtgattcatttggtgcccatttgaattctttatctggtatttcaaagatttcatcttgatttggatctgttgctggagaggtagtgtgatcttttgggggtgctgtagaaccatgttttgtcatattaccaaagttacttttctgattccttctcatttgagtagactatttcttttaattattcttgaatttatgttggatttgactgtgttttttttttcttttttccgcttaaggatgtgactttaatgtccctagctaattatagcctaatttggtccttggtgctttcaggggtgaagattgtaagagttccttggatatagggagtcttcgtgtgatggctttctcatatgctggttgtagaagcgatgtgctcactgtgtgagcaagttcactgttgcctacagggctggaatggtagaagwctcttgaagcttaactcattccccacaaggcatgcaattttttycccagtattttattgactggtttgatggttcaggcttcaggtctgtaggggagtgcataggaagtgattgtggccaaaacatgtgagtaaatgcaacacccaatggtgagcaaaggtcccagccttgacagaggtggctggaggagctctcagtgagttgcatcgagattttttttttttttttttgagacagagtttggctcttgttgcccaggctggartacaatggcatgatctcagctcaccccacaacctccgcctcccaggttcaaggaattctcctgccgcagcctcctgagtagctgggattgcaggcacttgccaccatgcccagctaattttgtatttttagtagagatggggtttctccgtgttggtcaggctggtctcgatctcccaacctcaggtgatccgcccacctcggcctcccaaagtgctgggattacagccgtgagccaccatgcctggctgtgcaccgtggtcttatcaggcagaagggttggagccacctcagctcccctgccaggtcagccagaaagccatccatctctcagacacactcgtgatccagtgctccagctattcagatcagacgggcacctcttttcatctgtaggaatgttggtgttctgagtagagaggaactgtgaatctgtctcttatgcaagcctaaacctagaggggctcctcctgtggggatgcagtcgccctgatatgttccagaaaggctgtctatagttgtacccatgctgagctcccatgggagaaaccccaactgtgcctgtggcagtggaagagaggggaaagacatccccttatccaagacccttcatgcacaccagggctgtctgatggttgggttagagctgtgggctttccgtgctgagcccagcactgaaactgtgtccctgctgaaagaaacttcccaccagcagaaagatctgattttcaagtcctgctgtccagattcttttgtcccatggggtgttcccttgatgtggtgcactccccattcccctaggataggagtcactgagcaccagactacagtgagtgttattgttcctctgggtctagccacccagtgaagctgccacacttcaggctggttcttgggaatgtctccaaggaatccggtaatgtcccctgtcctcgagactcccagcaatgggaagcagcaccagctctaatgggggtggcaggagagagacacaggctctgtgagattccttgctgatggacagccttagtaggttggcttccttgaatgctagttatagtagtaatgaactgatcatgtggacagactcaggacctcctggttagccagagtggtgcatgcagtggtgatagctgaggacatagagccattttctccttcctgggcccagtgttatcctaccaggagatgctgtcatggactgtgttggttggcctccacccagcaggtggagcaccagctgcagtagtagcagtgggatattcacttgccctatgttgcccagggtggctactcttgtttctcaggcaatgggcagagccacagagttcccaaaagyttccgtcctttgtattaaagccaccagggcgggtggcagggcaaagccaggtgtgggctgggtcaggcagttttgtgctctaactctccctgtgcagggcaagcagcagctcctgtgggtatcagggggtgggggtggttttcagacccatgtgctgataatccagagaggaatgtttctgcctctgctgcacagaagagtttgtgtagggagtggggagtggcaggtggcagtaagccccacgcggatcccacacacttggcgaggcagatcccctcccaccctgttccactggcagtggtgagctaagttccaggcagcctgtgctcagaacttgcaaatgcccccaagtcataagctttccctgcagagatagcaaccactgctctcaggccatgcccctccccatctatcccacctagccatgtgccagggtcctgcacacgtgtctgcagcttgcttttcattcaccccatgtgggtggagaagttcacctccacccacagttatctcatgaaacccagctgggggcttctttcaacctgcgaccacccacctgaactttttggctgaccactgcagggtgccctgtgaggaacaataaggaatggcttccctgggtccatactgggatctgggagtgcatgcagggttcttcccacagctcctacttatattccacgaacctccccaagtcatatcctgcactgaatagggttaaggccttaccccagagactggactttcaggctccctggtgtggtgggggcgtgtgtcctgcaaacagtctttccccatctcacaccctggggactcgcagcccttcacttgagtcacagtataggctgcagcccgtcacttccttcaaagggactgtggattccttcagatttcctgtctaattcctgaatcacttcttgaaaaaaaagttcacagtgtgaatctctacacagtgttttgtccttccaagtgggaggggtatgccagcaatgcctctaatccaacatgtttgctgtcctgctctttcatagtaggacagctaggactttccagaagtgcccccataaatctgcatgggccagagcttgacctccctctagctgcaagggaggctgggaaatatttgcccttcctgcctgtgggctgagaaacgttggcatggaagggagcttgaaatggccttggggtagccagtctacagtgcccggctggctccacccatagaaggttcctgaggacaaatctgtcttgtttactgctctattccaacagtcagaagagtgccgggtgcccactgattgcttcataaatatttatggaatggaagaatgatctttcttcctgctgcagatccctgcagtgctttatgccagtctgctggtgctttgaatatcaaacatgacagtcatgtgatggagaatgtttgaattttattgctattttcttggcaggtttatggagaagggctgttgctaatgctaaaagcattggacaccttatttttggtgagtatttggggaacagaaaggtcaaagcctagagatattttatgcaaggagattcacagtacttttcctgcatgtggcagaaaagaggcctgtgtataatggttctaacaaccacatttcctgacatttattctcatacactgaacattgattatgggcagccasgaagaccacagagtggatgagagtacagacacccttggaaggaatgttgctgtggtacatgtgagctttgtgacctctgaaaagttacctaacctctctgtgcctcagtttctgcctctgtgccatgtgggtgatrataatagtagttatgaggattaaatgagttaattcatcaaaagcacataggacagtgtctggtagataaaggcactcagtaaacattagcaatctggctggatgcagtggctgacacccgtaatcgcaacacttgggaggctaaggcgggcggatcatttgaggccaggagttcaggtttctgatcctggccaacaggtgtgtggagctggtgcctgctacttccaggcctggctacaaaaggccttctgtggctctccagctctctcctctcatggaacagacaaggagaccttgtgccaagaggagaagctcttaaacccaggaggcggaggttgcagtgagctgagatcacaccattgcactccagcctgggcaacaagatgcaagcagcctggcccggcgcagtggctcatgcctgtaatcccagcactttgggaggcccaggcggacagatcacttgaggtcaggggttcgagtgcaagctgggtaacatggtgaaaatgcgtctctactaaaaatacaaaaattagcyaagtatggtggtgcacgcctgtgatcccagctactcaggaggttgaggcacaagaatcgcttgaaaccaggaggcaaaggctgcagtgagctaagatcacaccactacagtccagtctgggcaacagagcaagactccatcacacacacacacacacacacacacacacacacacacacacacaaaattggcattcgttacctgttcatcatttaaccctttgaatgacctgaagaagtggatgctgttgtcccctccattttgctgagagccaccgggtcatggaaaggatgcgtgactcacytatgtaactggttggtgagtgcagacacagggatctataggggaatcgtatggtggttctgatccaaagcctgtctgcctgaatccacatcccagctccacctctcatgcgttagtgaccctagaaagctgcttaaattctctgtgaaaaaaattaaaaaataaagaaatgaggggccgggcgcagtggctcacacctgtaatctcagcactttgggaggctgaggtgggcagatcacctgaggtcrggagtttgagaccagcctgaccaacgtggagaaaccccatctctactaaaaatacaaaattagccgggcgtggtggtacatgcctgtaatcccagctacacgggaagctgaggcaggagaatcgcttgaacccaggaggtggaggttgcagtgagctgagatcacaccattgcactccagcctgggcaacaagagtgaaacacagtctcaaaaaaaaaaaaagaaaaaagaaaaagaaaaagaaaaaaaagaaatgaaacaamcaaaaaaaaaaaaaaaaagaaaagaaaatcaacaacaacaacaaaattctctgtgacccaatttctcctttgtaaaatggatacaatagtgcatagccccaatcttgtatatttatatcaaataaatgtaaatatacatcaaatatacaagattgggactatgtactatttgatgtggggtttaaatgacctcatgtatgtaaagtacttagagcaaagcttgacacatgggagtgtcctcttaaatgtcaatattatttttattatgtcttgtattgttagaaaaagcaagccagggccaggcgcggtggctcacgcctgtaatcccagcactttgtgggggccgaggcgggtggatcaccaggtcaggagatcgagaccatcctggctaacatggtgaaactccgtctctactaaaaaatacaaaaaattagccgggcgtagtggcgggcgcctgtagtcccagctactcgggaggctgaggcaggagaatggcgtgaacctgggaggcagagtttgcggtgagccaagatcgagccactgcactccagcctgggcgacagagcgagactccgtctcaaaaaaaaaaaaaaaagaaagaaagaaaaagcaagccgggcacagtggctcacgcctgtaatcccagcactttgggaggttgaggtgggtggatcacttgaggtcaggagtccgagaccagcccagccaacatggtgaaacctcgtttctactaaaaatataaaaattaactgggcatggtggcgggcgcctgtaaccccagctactcgggaggctgaagcaggggaattgctcgaacccgggaggcaggggttgcagtgagccgagatcgcaccactatactccaggctgggcaacagatcgagactgtgtctcaaaaaaaaaaaaaaaaaaaaagaaagaaagaaagaaaaagaaaaaaaagcagacaaaatttatttattgacaattcaaaaatttgaaaaagatgaagcagaagcttgacctaaccgacgtgtatcaggacttagctttctatcgcattttcagcacatgtggaaaaattgaattttgatttggtctcaagtaaaaagttataacatgtacaatattttaattataaggatcaacactgctactattaggtaataatatttttaaatattaagatttttttgtttttttttgaatttttacttcaatagcttttggggtacaagtggtttctgttacacgatgaattatgtagtagtaaattctgagactgtartccacccatcagtgtatgttttagagtatgttgcattcaatatgtagttttttggttttgttttttgtgacagtctcactctgttgcccaggctggagtgcagtagcaagatctcgtctcactgcaacctctgtatcctgggttcaagtgcttctcctgcctcagcctccctagtaggtggaattacaggcacgtaccaccatgcccggctaatttttatatttttagtagagatgaggttttgccatgttggtcaggctggtctcgaacttctgagctcaagcaatctgcccgcctcagcctcccaaagtgctgggattacaggcatgagccaccacacctggccccaatgtgtagtgtttttttgtttttgttcttgttttttgagacggaatttcactcttgttgcccaggctggagtgcaatggagcgatctctgctcaccgcaacctccacctcctgggttcaagccattctcctgcctcaacctcccgagtagctgggattacaggcatgcaccaccatgcctggctaattttgtatttttttagtacagacagggtttctccatgttgctcagactggtctcgaactcctgaccgaaggtgatccacctgcctcggcctcccaaagtgccgggattacaggcatgacccaccactcctggccccaatgtgtagttttttatccccacctccctaccctcctctttctgaatctctgaagtccgttatgccactctgtatgcctttgcgtacccatagcttagctcccacttataagtgagaacatatggtttttggttttacattcctgagttactttacttagaatgatggcctccatccaagtttctgcaaaagacattattttattcttttttatggctgagtcatattccatggtgtttatataccacatattctgtatccactcatttgtcaatgggcacttaggtgggttcatatcttttttttttttttgagacagtctcactctgtcacccaagctggagtgcagtggcgcgatctcggctcaccgcaagctccgcctcccaggttcacgccattctcctggcccagcctcctgagtagctgggactacaggcacccaccactgcgcccagctaatttttttttttttttttttttttgkatttttagtagagaccggtgttagccaggatagtctcgatctcctgacctcatgatccacccgcctcagcctcccaaagtgctgggattacaggcatgagccaccatgctcggctggttccatatctttcaattgtgaattgtgctgctataaacatacatgtgcatgtgtcttttttttttttttttgaggcagagtctcgctctgttgcccaggctggaatgcagtggtgcaatctcactgcaacctccaactcgtgggttcaagtgattctcctgcctcagcctcccaagtagctgggactacagatgtgcaccaccgcatccagctaatttttgtatttttagtagagatggggtttcaccatgttggccaggctggtcttgaacgcctgacctcgagtgatctcccctcctcagcctcccaaagtgttgggattacaggcgtgagccactgcacccagcccacaagtgtctttttcatataatggctgcctttcctttgggtagatacccagtagtgggattgctggatcgaacggtagatctacttttagttctctgaggactctccatactgttttccatagaggttgtactaatttacattcccaccagcagtgtgtgagtgttccatttgcaccgcatccacaccaacgtctatggttttttttgaatttttatcaatggccattcttgtgggagtaagatggtatctcattgtggctttcatttgcgtttctttaatgattagtgatgctgaccatttttttcatatgtttcttggccactggaatatcttcttttgagaaatgtctattcatatcattgggatgcttttcggtgggattattcgttttcttcttgctgatttctttgagttccttataggttctgtataatcgtcttttgtggatgcctagtttgcaaatatttgctcgcattcagtgggttgtgtgtttactctgataattacttcctttgctgtacagaagctttttaatttactcaggkcccatatatttgtttatttttgagacggagtctcactccatcacccaggcttcagtgcagcagcacgatctcggctcactgcaatctccgcctcccagactcaagcaattctcctgcctcagcctcctgagtagctgggattacaggcatccaacaccatacctggccaatttttgtatttttaatagagatggggtttcgtcatgttggtctggaactcctgacctgaagatccgcccagctgggcctcccagagtgccaggattacaggcgtgagccatcgttcccatatatccatatgtttatttttgtttttgttgcatttgcttttgggctcttggtcatgaactcgttgcctaagccaacatctagaagagtttttttgatgttatcttctagaatttttatggtttctggtcttatatttaagtctttgatgcaaattcacattgaatttgtgagttgatttttgtataaggtgagaaataaggatcgagtttcattctcctacatgtggcttgccagttatcccagcaccatttgttgaataaggtgtcctttcccccactttatgtttttgtttgctttgtcgaagatcacttggctataagtatttggctttatttctgggctctctattctgttccattgttctacatgcctaattttataccagtaccgtgctgttttggtaactataggcttgtagtataatttgattgggtaatgtgatgcctccagatttgttctttttgcttagtctttgctttggctatgagggctcttttttggttcatatggattttgggattgtggctgggcatggtagctcacgtctgtaatcccagcactttgggaggccaaggcgggtggatcacctgaggtcaggagtttgagaccagcctggccaacatggcgaaaccccatctctactacaaatacaaaaattagccaggcatggtgcatgcgcctgtaatcccagctacttgggaggctgagacaggagaatcgcttgaacttgggaagcagaggttgcagtgagccaaaattggccattgcactccagcctgggcaacagagcgagactaagtctcaaaaaaaaaaaaaaaaaggattttaggattttttgttctgtgaaaaatgatagtattttgatgggaattacactggacttgtagattgcttttggcagtatggtcattttcacaatattgattctacccatccatgagcatgggatgtgtttccatttgtttgtgtcatctatgatttctttcagcagtgttttgtagttttccttgtagcagtctttcacctccttggttaggtatattcctgagtattttattttatttttttgcagctgttgtaaaaggggttgagttcttgatttgaatctcagcttggtcattgttggtgtatagcagtgctactgtttgtgtacattgattttgtatcctgaaactctactgaattcattcatcagacctaggagctttttggatgagtctttagggttttctaggtgtacaatcatatcatcagtgaacactaacagtttgacttcctctttactggtttggatacccttcatttctttctcttgtctgatggctgtggctaggacttccagtactatgttgaatacaagtgataagagtgggcattcttgtcttattgcagttctcagggggaatgctttaaacttttccctgttcagtgtaatgttggctgtgggtttgtcatagatggcttttattacattgaagtatgtctcttgtataccgattttgttgagggctttaatcataaagggatgtgggattttgtgaaatgcttctgcatctcctrtgatttttgtttttaattctgtttctgtgatatatcacatttgttgacttgcatatgttaagccatccctgcattcctagtatgaaacccacttgatcacatcatggcaaatttcaagctaccaacatgaggtcascgagcacagagttggaagacgggtacaaaattagctctccagaacccgtatcaacagactccaacccatggctgccatttctattaaagagacgtcgctgcaggtaatctrtattttctataactagtgactttacagttaaacattccccctgcctctgctcttttgcagcccgattactgaggctgcaagaaagttcacaaggggaacatcctcccccagaaggtaagcatcctactttgccatgaatccctaatgatagtgtggactgcacactggcttgaagccagccattgtcctaaaaactttacgtgtctgattcatgtggtgctcctttgggaatggagaggagcatggactctcccaggtgcctgaggccacgcagccaggaggggcaggatcggagttcaaactgacactctgtgaaaaatgatagtattttgataggaattacactggacttgtagattgcttttggcagtatggtcattttcacaatattgattctacccatccatgagcatgggatgtgtttccatttgtttgtgtyatctatgatttctttcagcagtgttttgtagttttccttgtagcagtctttcacctccttggttaggtatattcctgagtaytttattttatttttttgcagctgttgtaaaaggggttgagttcttgatttgaatctcagcttggtcattgttggtgtatagcagtgctactgatttgtgtacattgattttgtatcctgaaactctactgaattcattcattagacctaggagctttttggatgagtctaaccataggatccatgtacatagtcgtcagatataccctaggtatgcctaggatccaagtgtcagaggcagaaaatgggaacagcctgaggcaattagcaaattgagaggaaaaatacttcccaaaactacataggttgggagtcatgaaggaatcagacttgacccatggtgggagtacggagaacaagaacaaagtatcagatgaattctgtatggagaagttagattatattatggaggagactatatttgttcaggagaggctatgctgcgcaaagaaaccacaaattgctatagcttaagacacaaagggtttatattttgcttacccaaaaagcgatatgggttgagtgttcctccagggcaacttggctccatgtggggacttaggcatccaagctgtttgcgtcttttttttcctttccttttcttttttcttttttttttttggagacagagtctagccgtgtcacccaggctagagtgcagtggcataatctcagctcactgcaacctctgccttccaggttcaagctattctcctgccccagactcctgaatagctgggattacaggcaactgccaccacacctggctaatttttgtatttttagtagagacgagttttcactacattacccaggctactctcgaactcctgacctcaagtgatctgcctgcctgggcctcccaaagtgctgggattacaggtgtgagccaccgcgctgggccaagctgcttgcatctcgttgcttctcctcttggcacaaggtctccttgtctgttccatgagaggagagagctggagtgccacagaaggccttttgtagccaggcctggaagtattgggcaccagctccacacacctcctgttggccaggatcagtcacatggccccaacctaactacagcagaggctgacaaagatggtcttccttccagttgtggaagatgcaagtgtggctttttcacaggtcaacagtcaggtacagagtgaaggtaggtcctgagcacagcccttcatccacttcatgcctccctccctgttttagttgtgaaggctgccagaacaaagtgccatacataggctggctggcttagcaacaacagagattaatttctcagttctggaggctggaagcccaagatcagagtaccagtagggttggattctggggaaccctcttctgggttgcagagagccaacttcttgccacatggcgggctttaatgttgttttttgacaycagcattcaccatatgctggttatagacaagtctggaaggagaatctatctccaacctgcaaatggctaactaatgttgtgggatggtaggctggtgattgtaccactgcactccagcctggtgacagagcgacaacctgtctcaacaacaacaacaacaaaaaagaaatggcaaccccaaggtgatggtattaagagatggggcctttgggaggtgttgagaccatgagggtggagccctctwgatttggattaatcccttataaaagaagcctcagagagctcactccaaggaatgcggtgaaggttgaagkgtagaatttatgcaaaatgccaagatgagcctggcaggtgacgttctcagcaaacgtgagcagagctattatcagtgtgtgtgtgtgagagagagagagttgaacatcatctaattcatgagtgtggataaaaataagaggggatgccaggcatgatagctcaatgcctgtaatcccagcactttgggaggctgaggggggtggatcacttgaggtcaggagttcgagaccagcctggccaacatggtaaaaccccatcagtactaaaaatacaaaaattagccgggcctggtggtggtgcgtgcctgtagtcccagatactccagaggctgagccaggggaatttcttgaaactgggaggcagaggttgcagtgagctgagattgccccattgcactccagcctgggcaacagagcaatactctgtctcaaataaataaataaataaataaataaataaataaataaataaataaatgggagmctttgcctccaaccctgaagaaaataagcgtgcaaaagatgagtagaggtggaggcagagatgaaggagctagaaaaaagaggccagaaagtcagagagagtgaggtaacatgggggtcagcagaaggcaaggggagagagggtcacctggagaaggaggtcacctcaggaggaaccgcagggcattgcagaagatgaggcagagcagggtctgtgatgttcttggtagggtacttggacagtgtctgagaccacctggatttcttgacgtagatgaaggcggtgagcctgaacacacctggctgactgagatgctcgagaaytggaccaggacctccctggaaaagcaggagcagccccatgaggaccccgaaaggaaaggtaccatgtgtagtgtgataagtgtcatcaacagtaagtgccaccaaccttctcccccctcttgctcttycccacccctgtgggccagtcctgcaggggacatgaccagatgtcccactggtacagtttggatatttgttcccttccacatctcatgttggaatgtaatcccccaatgtaaattagttcaaccattgtaggagacagtgtggaattcctcaaggatctagatccagaaatactatttggcccagcaatcccattactgggtatatgcccaaaggaatgtaaatcattctgttagaaagatacaggcacatgtatgttcactgcagcactattcacaatatcaaagacatggaatcaacccaaatgcccatcagtgatagactggataaagaaaatgtggyacatatacaccatggaatactatgcagccagaaaaaggaacaagatcatgtcctctgcagggatatgggtggagctggaagtcattatcctcagcaaactattgcaggaacagaaaaccaaacaccacatgttctcacttataagtgggagctgaatgatgagaacacatggacrcagggaggggaacaacacacactggggcctgttgggggcgggtggggagaagaagagcaccaggaaaaytagctaatgcatgtggggcttaatacctatgtgatgggttgataggtgcagcaaaccgccatggcacatgtttacctgtgtaacaaatctacacgtcctgcacatgtgtcccggaacttaaaattaaattaaattaaattaaattaaaagaaaaagaaatgtaatccccagtgttggaggtggggcctggtgggaggtgattggatcatgggggcggatccctcatgaatggcttagcgtcatccycttggtgattagtaagtgcttgctctgagttcatgtgagatacggttgtttagaagygtgtggcaccttccccctcrctctcttgctcctgctctcggcaagtgatgtgcctgctccccaytcactttccatcatgattggaagcttcctgaggccccaccagaagcagatgccagcaccacgcttcctgtacagcatccagaactgtgagacaattaaacctcttttctttataaattatccaacctcaggtacttctttatagtaatgcaagaatggactgatacgcccaccctctatccacccaaccggccatccatccatctaggatgtcttgagtcattagcatgaaataataactctcctactagcaggctgggggtaggggtgacaaaggggaaatgtcagaccaagtgcctgcctggaggactcatggtctagaggacgagatggagaatagacaggtaagccaaccacaggcaagtccatccccgactgggctaatttctatggagagggctgggtgcagtggctcacacctgtaatcccagcactttgggaggctgaggcaggaagatcacttgagcccaggagttcaaaaccagcttgggcaacatagcaagaccccatctctacaaaattttttgtaaaaaattagctggacatggtagtgcgttcccatggtcccagctactcaggaggctgaggcaggaggatcacttgagcccaagaggtcgaggctgtagtgaactatgattgtgccactgcattccagcstgggtgacagagcaagaccctgtctcgaaaaaataataaataagtaaattatatggagagacaaggagaggcgagagcaggtatccggtgaaaaattctgagagtgaagtagcgtggatgagggacaatgaagacagttggtcgctgaagccactgccttcctgagatgacccaggtacagccagtctcacccccagacatccaacctctcacctctgtgatgacccggtgtccaggcrcagacacacccagagtcctcctgaccagctcatcagcagctcaccaaggaaaggaaatcaaggtgtactctcttcagactctagatttcccttcctcctccttttattcatgttacataaattcctgtttttatctctgttggatgaaatcagtctattctctggtttcctttgtctacaatttaaagagggagccgactattaacttgatgtctctgagctattgttggccaagctccccttagatgggattaatgaagaagcctccttttccaaggtgatagctcagaagcaacttgaagaatgagtgacaatgagcctaccaagtggaaatgtggggaaagtcagccagagttcatctactgacttcagtctggcagatgagaggcttgggtttacccctccggtgggtaatggagagagatggaatgtgccacacgaagcctcactatgactttctataatgcctggctcctgtgctgaaatgagaacatgcatcctagccggscatggtggtgcgtgcacctgtagtcccagctattcggggaggctgaggtgggaggattccttaagcccaggagttggaggctgcagtgagctatgaatgcaccactgcactcagagtgagacccccatcccttaaaaagttttcttttaaaraacgtacttttttttgttttgttttttgtttttgtttgtttgtttgagatggagtctcgctctgtcacccaagctggagtgcggtggtgcaatcttggctcactgcaacctctgcctcccgggttcaagcgattctcctgcctcagcctcccgagtagctgggaccacaggcatgcaccaccacacccggctaatttttgtaattttagtagagacagggtttcatcatattggccaggctggtcttgaactcctgaccttgtgatccgcccacctcaggctcccaaagtgctgggattacagatgtgagccactgtgcccggccaattcttaacttactataagatatacttgagcccaggtattcaagactagcctggaaaacactgtgagacctcatcttttttaaacaaaattaataaatagataaaacrtttaaaaaagccaggtgtgatggctcacgcctgtagtcccagctactcaggaggctgaggcgggagggtcgcttgaggccaggagttcaagaccagcaagcctgggcaacgtagtgagacctcctctctaaaataaataaataaaaatataagatagaatggccgggtgtggtggctcatggctktaatcccagcactttgagaggccraggtgggcggatcgcttgaggtcaggagcttgagaccagcctggccaacatggcaaactctgtctctactaaaaatgcaaaaatacaaaattcgccgggcgtggtggcacatgcctgtaatcctagctacttgggaggctgaggcaggagaatcgcttgaacccgggaggcggaggttgcagtgagctgagatcacgccattgcactccagcctgggcaacaagagtgaaactctgtctcaaaaaaaaagaagaagtatgkagtcctcaggccacatttagttttctttaacatgttaaatattaaagggctatcaaagcaatgtaggtgtgatttgcttttctgctgctaaactcttgtagaagttaatatttattaagtgcctactatttgctggatgtgttaggtttcttcagagaaacagagccaataagatatctatctatctatatctacctatctatgtctctgtctgcccaaatctatgcatctatatctatgtatttatagctatctatctctatctatctaactagagatatttattttaacaaattggctcatgggattgtgaagatgacaagtccaaaatccatggggcaggccaacaggccggaaaccgagacaggattttttaaaatttaatttaatttaaagtttgaggatacatgtgcaggacatgcaggtttgttacccaggtaaacgtatgccatggtggtttgctgcacttatcaacccatcacctagatattaagccccacatgcattagctgtttaccctgatgttttccctcccaccgccccctcaacaggccccagtgtgtgttgttcccctccctgtgtccatatattctcatcattcagctgccacttataagtgagaacatgtggtgtttggttttctgttcctgcattagtttgctgaggataatggcttccagctccatccctgtccctgcaaaggacatgatcttgttcctttttctggctgcatagtattccatggtgtatatgtgccacattttcyttatccagtctaccattgatgggtatatttggttgattccatgtctttgctattgtgaatagtgctgcaatgagcatacgcatgcatgaggcagaatttgacgctccagtctggaggtagaatttcttctkctctagaaactgttttgccctcaaagccttcaactgagtagatgagacccasccacattactgagaataatcttcttgaagtcaactgattttagctgtcaaccacatctacaaaataccttcacagccacatctaggctagtgtttgattaaataactggttactgtggcccagcctagttgacatgttaaaccatcctcccaacatcctaagtgctataggcaggctcttacttattcytcataaatctataagggataggtgttactctcttcctggttttacagatgagaacagagatgttaagtaacttgctcaggggcccggtgcagtggctcatgtttgtaatcctagcactttgggaggccgaggtgggaggatcacctgaggtcaggagttcgagaccagcctgaccaacatagcgaaaccccgtctctactacaaatacaaaaaaatatttagccgggcgtagtggtgggtgcctgtggtcctagctatttgggaggctgaggcaggagaatcacttgagcgcaggaggcggaggttgcagtgagccgagattgcaccactgcactacagcctgggtgacagagcaagactgtctcaagaaaaaataaataaataaaagtaacttgctcagggtcacacagctaatgagtgatgaagtcaaattcaaatcagcatctagctcaagcacccacctccctactagctttgctctcttgccactctgcccctgctgttcagagaaaggattggagctgaaaaaccaggaagagggaaatcagagggggaggcagtgttgcatcctggatggaaaagatgctgcataaggtactggcagatgagattgggaggagcagagacactgaagaggaggtggaattggcaggtcttggtgatagtccagggtgagggtgaggaagaggcaggcgtctgggataatgacctggtttatccctgactgacttggcagcctcttgggctggggaagggagcacgggaaagtgtgctgggcattttggaacagctcctggaacattctgcgtcgttctcccccatgaacctaaagagaacaagctcatttccccagatacacaggtgatcatacagtcattaaatcgccatcttttccttgccaactcccccaaccccaatggctcaaagtcatctcacctgtggctcaatgatagatgctggatctgacggccaggacccccaggcccctgtatgccaacctttcccagctcaccagatttgtcagctctgctgccctaacaaaagttgaagtggggtggcttcaactataggcttttatttcctcaccgtttttttttttttttttgagatggggtttcaccatgttgcccaggctggtctcgaacccctgacctcaagtgacccacccacctgggcctcccagagtgctggaattacagatgtgagtcactgtgcccagccttattttcttacaattctgcaggcaggaagtccaagatcaaggtgccagtggggtcagtttctcctgaggcctctctccatggcttgcagagggatggccrccttctcaccgcatcctctcagcccagcctttcctcagtgcacacgcattcttggtattcttggtgtcttcctttttttcttttttttttttttttagatacaaggtctcccttgtatctaaatgatctgagtgatacaagtgaggctggaatgcccaggctggagtgcagtggcacaatcatacatagttcacttcagccttgaactactgggttcaagtgatcctcctgcctcagccttctgaatagctgggaccacaggcatgcattaatatgcccagctaatttgtttattttattttatttttgtaaagatgcggtctcgctctcttgcccaagctggtctcaaacttctgggctcaagcaatcctcccacctcggcttccctaagtcctgggattactctggtgcctggcactctttctcttctcataaagaccccagtcctattgaattaggatcccactctcatgacctcagttatcctgaatgacccccccacttttttttttttttttttttgagatggagtctcgctccgtcatcaggctggagttcagtggcacgatctcggctcacttcagcctctgcctcccaggttcaagcgattctcctgcctcagcctccccagtagctgggactacaggcatgcgccaccaccacgcccagctaatttttgtatttttagtagagacagggtttcaccatgttggccaggatggtctcgatctcttgatatggtgatccttctgcctcggcctcccaaagtgctgggatgactggcgtgagccaacgcgccggccctgaatgacctctttaaaagtcctgtctccagatacaaccccatgggggatgagggcttccacatatgactttggtgggggcagaaaccactcagtctcctgaactcaccttggctgtctcggcttctttccctaggctcactcagtaacttgatggattttgtgaagaaaacaggcatttgcgcttcaaagtgggaatgggggaccmctcacaacttcctgtacaaacacggtgagaagaccctcttcccacygccctggtctgtccttgcgtgtgaatgggctggagtaggggaagggggtgggcctgaaacaatcccaggctggtccttccccagagctttggaggggggtggtgtcaaagkgcccagggatctgattaggggaactttcgctcagtggtgtggtccatactgaaaaatgtgtggcctcgctgcgagtcccagtcatcgtgaaaagcctcactgatggctttctctggttttgcaaaaatgcaaaaaaccctaatttcttgtcagctagtcctaggacctggtcttcaaaaacacttgtatgggctgggcgcagtggctcatgcctgtaatcccagcactttgggaggctgaggcgggcggatcacttgaggtcaggagttcaagactagcttggccaacatggtaaaaccctgtccctactaaaaatacaaaaattagccggacagggtggcgggtgcctgtagtcccagctactcaggaggctgaggcaggagaatcgtttgaacccaggaggcagaggttgcagtgagccgcgatcatcccactgcactccagcctggcaacagagcgagacaccatctaaaaaaaaaaaaaacaacacacatttgtatgggttttcccttcaggggactgaccctctcattcaggtggaattgatgtcagactcctgggaactcacactgaggccatttaatagtctccataagctccaatgttcatagctggtggagatcctctcctatgaccatgccaatccctgcaccactcatgtatgtgtatgtgtgtgtgtgtgtgtgtgtgtgtgtgtgtcttgctctgttgcccaggtgggaatgcagtggtgcaatcatggctcactgcagcctcagcctccccagctcaagcaatcctcccatttcagcctcccgaatagctgggaacacaggcacacagcaccatgcctggctaatttttctttttctttttcatagagatggggtctcactatgttgcccagactgatcttgaacccctgggctcaagcgatcctcccacctcagcctcccaaagtgctgggattacaggtgtgagccaccccacacctggccttccccactcttttgttacaagactatcgtgaacatctttatgtttgtggtcctgttgcccttgtgcaaatcgagaaaaggtgcatcttccaggggggtgaattccaaaatgtgcccccctggccagggctgtgtgtggcctgggaagggaaccctggctggatgtcagtcctgctcacctctcctggggtgcttcctacaaggcacacaggacttcagctgtgtctgmgcaccatgccatgcagctgccgggtcttatggcctcggaatacaccatcaagcatcaagtcastggatcatggcgatgagtgttttagcatcaaatttctccctgaaggggttggatgaagtcgctttctcagtagcaatatatgagagtgtaaaccaaaaataaaattctaagccccccaccacccaaccatctgaatagacctctcctgtcagccagggcactccaaagttaacctgaaaaatgggttcagtccctgatgggaagtgggggtcggacatgcctccttataccctcctcccttttggaattcaggaaaagctgactagcagtcatgtcaacacaaatttttttttttttttttgagatggagttttgctctttttgcccaggctggagtgcaatggcgcgatctcagctcaccgcaacctcggcctcctgggtttaagygattctcctgcctcccgagtagctgggattacaggcatgcgccaccacgcccggctaattttgtatttttagtagagacagggtttctccatgttggtcaggctggtctcaaactcctgacctcgtgatctacccaccttggcctcccaaagtgttgggattacaggcgtgagccacctcaacacagattttaagtctgataagaaacatttacattctgttctctctgaagcctgctacctggaggcatcatatacgtgataaaactttggtctccacaaccccttgtcataacccagacattcctttctattgctaataactctttaaaccaatagccaatcagatatttttattttattttccatatatttatttattaattatttttatttatttatttatttattttgcgatggagtctcgctctgtcacccaggctgcagtacagtggtacaatcttggctcactgcaaccaccacctcagcctcctgagtagctgggattacaggcacatgtcaccatgctcaactgatttttgtatttttagtagagacagggtttcaccacattggctaggctggtctcaaactcctaacctcaaatgatctgcccaccttggcctcccaaagtgctgggattataggtgcacaggtgtgagccactgtgcccaaccgtcaatcagaaaactttaaatctacctataacctggaagcccccccccgacccctcctcacccctcacctctacccctccatgacttcaagtcgtctcacctttctggaccgaaccaaggtatatcttagatatatttgattgatgtctcatatctccctaaaatgtataaacctaggctgtgccccaaccacctaggccacatgttctcaggatctcctgaggactgtgtcacgggccattggtcactcacatttggctcagaataaacctcttcaaatattttccagagtttgactcttttcatcagcaagaggaaccattcccagaggtactgtcttagtctgctcaggctgctgtgacaaaatcccacagactgggtgacttaaacgacagacatttattttctcacagttctcaaggctggaagtccaaaatcaagttgtctgtggggtgagttctttctgaggactctctctgcgatttgcagacagccaccttctcatatcctcgtatggtctttgctccatgtgtgtctctgttctaatcccctcttcttagaagagcactagtcattctattggaatgtttcaaagttttatcatgcagatgtgtgagaggcattggaaccagagtgactctatcttgaatgagggctaggaaaaatgaggctcagccttgctgggctgtatccccaggaagttaggcattcctagcctctagatggttatggttaagggaacagattcataatgtttactaaacagactcagacccaggaatgtcctgatatcctgatatcttgagaacagacgcattcctaattttgctttaaaaataataatataagttcttgtaaaatatagtaattatggtttttggtttttttttttttttgagacagagttttgctctttgttgcccaggctagagtgcagtggcacaatctcagattactgcaacctccgcctcccgggttcaagcgattctcctgcctcagcctcccgagtagctgagattacaggcaggtgccaccacgcctggctaatttttgtgtttttagtagagacaggatttcaccatgttggtcaggctggtcttgaactcctgacctcaggtgatccacccaccttggcctcccaaagtgctgggattacaggcrtgagccaccgtgcccggccaaaatagagtaattatgaaaattaatcctttatcacaaatacttgtagcagagcacatctccccatgtttttttgttgttgttgttttcctatatataacaaaaggaggaggtggttgcatttctcctcttactttccgtaacaccctactctgtggagtaacgattctttcacccytttgctttcttaacagacttgctttcgctttgcactgtggactcaccctgaattctttcttgtatgagatccaagaaccctttcttggggtctggatcgggacccctttccagtaactgatgaaggctccaggtagcaagcttcagagagaatagattgtaaatgattcttgtcagacttaagctctgggtggatattaaatgctggtcagctttccttaaatccccaaagggaggagggcatcgtgaggcatgtctgaccctcccttcctgtcacggccagaactaggttttcaggttaactctggggtgccctggccaagaggaagggttcattcagatggttggggtggtgttgtgggggggtaggagttggggagggtgttggcggggggacgggagggatgggggtgggggggaggggcttatcattttatttttggtttacgctgtgaaaggaaaataaatctcgggaccccaaaatcaccaagttaaagggaaaagtcaagctgggaactgcccagggcaaacctgcctcccattctattcaaagtcaccctctgctcactgagataaatgcgtatctgattgcctccagttggaaaggctaatggaaactctaaagaatgttggccggcccgtggctcacgcctgtaatsccagcactttgggaggcagaagcgggtagatcacgaggtcaggagttcaagaccagcctggccaagatggggaaaccctgtctctactagaaatacaaaaattagctcagcatggtggcgggtgcctgtaatcccagctacttgggaggctgaggcagagaatcacttgaagccaggaggtggaggttgcagtgagtggagattgcgccactgcactcccgcctgggcaacagaacgagactccttctcaaaaaaaaagaatgcaaccattcacttcttatctacctgtgacctggaagccccctccctgctttgagttgtcccacctttccagaccgaaccagtgttcatcttacatatattgacatctcaggtcttcctaaaatgtctaaaccaagctgtgccccaaccgccttgggcacatgtcatcatgacctcctgaggctgtgtcacggttgtgcatccttaaccttggcaaaataaactttctacactgaccgagacctgtctcagaaacattgggttaacaacrctctcacatattgctgctgagaaggcagcttcatttggaacttcacgccaaaaaccccattttaccttaattacctctttaaagaccctgtctccaaatacagtcacattctgaggtactggaggtaagagcttcaacatgtgtttgtctgtttatttgtttatttatttgagatagagtctcgctctgtcacccaggctggagtgcagtggcgcgatctcagctcactgcaacctccggctcatgggttcaagtgatcctcctgcctcagcctcccaagtagctgtgattacaggcacccgccaccacgcctggctaattttgrtatttttagtagagacagggtttcactgtgttggccaggctgatcttgaactcctgacctcaagtgatccrcctgcctcagcccccaaagtgctgggatttcaggygtgaggcaccgcacccagycagggcttcaacatatgaatctgggaagagagagaagtcagctcctagttggcaacctcacaactgctgtctacactgacaacgatcattttcccatccccctctctgccttccatttmcaagtcttgctttcagtccccagaagcagctgatcctctttcttcctgggcaccacaggtggcatccgggacaagataatgagcagccggaagcacctccacctggtggatgctggtttagccatcaacactcccttcccactcgtgctgcccccgacgcgggaggttcacctcatcctctccttcgacttcagtgccggagatcctttcgaggtaatcgagaagggctttggggccggtcctgggtgggaggtgggctgyggcgaagctgactttgcggaggaactgaggacgcgggctgggaagcgggcaatggggaggtgctggctgggaagtccagagagccaaatcaactcacccatcgctcccgaagcacccgcrgtcggccacatccaacgaacttctgatccaaagccatcccagaccttcccgggcccctcttcctggcagatgactctccccgcttctgcgtcctgcctgcccattcataccagtttgaactgcaacagcctagctcctcacctgtgcacctccttccccaggtgtgcacgtctccagccccgagcgcgtgtcttcctgctcatctgggtttcctgggcaaatagtggccctcaataaatgtttgctgagtgagaacatatgcaagtatatttgtcttagtacatattgcaccttcccagtggccactaggatccgttctccctgccttcatatcccagctctgccacttaccagctgtgtggcctgatccaatgtgcgtaacttctgtgcatgtcggtttcctcagctgtaaaattgggctaacgatggctccaccaggagttgttctgtggattaaattaatacttgttaatacatgtgaagtgcttagcacagtatctgccacttactgtggggtttataaacattttcctcccctcccytcccctcccctcatggcctcctttcgagactgggtcttatggtgtgatcatagctcactgcagcctcaacctcctgggctcaagcgatcctcccacctcaccctcccaagtagctgggactgcaggcacacaccaccacaccaggctagttttctaaattgttttagagacagggtcttgctatgttgcccaggctggtcttgaactcctggcctcaagcgattctcccaccacccaaggctaggattacaggcacaagccgccctgcccagctattttattaaaaaatatatacacctacataatatataactatatctattacatgrtacataccaatacatagtagtatatataaaataatcatggtaaaacatatcatctattatatttatgtgtaatgtaatatatatttatattcacacacttctatcagtttacattctgtaatatgaattaggaacatccatcctcctccccataccatratccagaaccaacttgtcaccatctttctagacccttggcccaggaatacccaggctttctggtcttaggatttctgctgaaataaatatcccaagacaatatgataaaggtggaatgagatatcaaggtcttgggagtccttttctgccaaatctctgctgcatgaccccgagcgataggcttaacctctgaacctcagttttctcatcctgaaaatgggaatcacatcatctggctcgcaggagatctgcagagtctctgcaccatgcctggtccatagctggtgttctggattaacaacaatgcttatctggtgatgatgagaatagcaagagtaataggaagaaaaccggcagcatttgttaaacttcaatcaaagacgacttcagagacctaagctgtccactacagtggttgccggccacatgtggcacttgagsacttgaaatgtgcctggcccaagttgaagtgtgctatgaagataaaatacacctcggattttaatgaccgagtatggaaaaygcatgtcaaagaccttattcgtaattggtatattgacatactwggcagggctctccagagggacagaaccaataggatctatgtctagatgaaagggagtttcaggatcacaaggtggagtcctacaataggccgtctgcgagctgaggaagaaacaaaccaatagtggctcagtccgagtccgaaagcctcaaaagtagggaagcccagccaggcctggtggctcacgcctgtaatctcagcattttgggaggccgaggcgggtggatcagaagatcaggagttcgagaccagcctggtcaacctggtgaaatcccgtctctactaaaaatacaaaaaaattagccgggcgtggtggcaggtgcctgtaatcccagctactcgggaggctgaggcaggagaatcacttgaacccaggaggcggaggttgcagtgaaccaagattgcgccattgcactccagcctggtgaacaagagcaaaattccatctcaaaaaaaaaaaaaaaaaaaaagtagggaagcccacagtgcagccttcagtctgtagccaaaggccgtagagcccctggcgagccactggtgtaagtctaagggtccaaaggccaaaaaacctggagtgtgatgttcaagggcaggaagtatccagcacaggagaaagatgaaagccagaggacccagcaagccagcttctcccaccttcttctgtctgctttgttctagtcacactggcagccaattggagggtgtccgcccacactgtgggtgagtcttcctctcctagtccactgactcaaatgttcatctcctctgacagcaccctcagagacacatccggaaacaataccagctttccaggcacccttcaatcaagtcgacacctaatattcaccatcacaattgattacacatcgaggcaatcacacttttgacatattgcatgagatgaaactttttcctacaaattgggtggttacaaagtaataaacagaattttttttttttttttttgagacagagtctcgctctatcacataggctggagtgcagtggcacaatctcggctcactgcaacctccacctcctgggttcaagcaattctcctgcctcagcctcccgagtagctgagattacaggcatgcgccaccacacccagctaatttttgtatttttagtagagacggggtttcaccatgttggccaggctggtctygaactcctgaccttgtgatcygcccgcctcggcctcccaaagtgcagggattacaggcgtgagccaccacgcccggccaataaacagaaatttaagcaagacatatctgtaacaatttaacagaacctgattgtctaagttttttttcatttttctcaaattcatctttaattctttccatgatggggcttataaggaaactaaccaacatgtagctactatagttgaatgtcaaatcttttttttttttttgagatggagtcttctgtgtcgcccaggctggtgtgctgtggtgcgatcttggctcactgcaacctccgcctcccgggttcaagtgattctcttgcctcagcctcctgagtagctgggattacaggcgcccgccaccatgcccggctaatttctgtatttttagtagagacggggttttgccattttggccaggctggtcttgaactcctgacctcaggtgatccgcccacctcagccttccaaagtgctgggattataggcatgagccactgtgcccagctgaatgtcaaatctttagaaggtacttatgacagtaaattcctctgtaatacaggtatgaagcaccttcatgatatttctgttttatgtgtagaaaagtggctgggtrcggtggctcactcctgtaatctcagtgctttgggaggccaaggtgggaggatcacttgagatcagcaatttgagaccagcctgggcaacatagcaagaccccatctccacacaaattttttttttttttgagacggagtttcgctcttgttgcccgggctggagtgcaatggcacgatatcggcttgccacaacctccaccttccaggttcaagcgattctcctgcctcagcctcacaagtagctaggattacaggcatgcgccaccacacccagctaatttttgtatttttagtagagatgggattgctccatgttggtcaggctggtcttgaactcccgacctcaggtgatctgcccacctcagcctcccaaagtgctgggattacaggcgtgagccaccacacccggccaaaaaaattttttttgattagctgggcatggtggctcacgcctgtagtcccagctacttaggaggttgagatgggataacctgagtctaggagcttgaggctgcagtgagccatgattgcaccactgcactccagcctgggcgacacagcaagatcctgtctctaaagataagtatatgtagaaaactgttagactcaaatattcaactcaatataaaataagaagaagccgggtgcggtggctcacacctgtaatcccagcactttgggaggtagaggcrggtggatcacctgaggtcaggtgtttgagaccagcctggccaacatggcgaaaccctgtctctactaaaaatacaaaaattagccaggcatggtggcacgtgcctgtaatcccagctgctagtggggctgaggcaggagaatcgcttgaatctgggaggcggaggttgcaatgagccaagatcccgccactgcactccagcctgggcaacagagcgagactctgtcaaaaaaaaaaaaaaaaaaaaaaaaaagaagaagaagaagaagaagaagaagaaacacttgttgagactgcatctccttttgctaatgagtggtttctagttgtaatatcactcctctgaataaagaagccacctttgagtacataaggaaaaataaccacatgttaaaaggataagacattactccgacatctctactgggccatctcttcctctaacacttcagaaacttagaaatttaaaatattcttacgttaactgcaagaacaagataaaggagaaatgccctttttcttgagatcacaactatgaagtcatatgcttatgcaacttctgcatttgtgtgcaaaacacaaacacactgatctttttttaacttttaagttcaggggttcaagtacaggtttgttccataggtaaacttgtgtcctggggatttgttgtaccgattatttcatcgccccagtattaagcctagtacccattagttatttctgctgaccctctccttcctcccgctctccacccaacactaggccccagtgtgtgttgttctcctctgtgtgtccatgtgttctcatcattcagctcccacttagaagtgagaacatgcagtatttggttttctgttcctggaaacacatttatacatttatcttttttttttttttttttttttgagacagagtctcgttcttgttgcccaggctggagtgcagtggtgctatctgggctcactgcaatctctgcctcccatgttcaagcgattctcctgtctcagcctcccaagtagctaggactacaggcatgtgccaccatgcccggctaattttttgtaattttagtagagatggggtttcactgtgttagccaggatggtctcgatctcctgacctcgtgatccacccacctcagcctcycaaagtgctgggattataggcatgagccatgagccaccatgcccagcctctttcttgctcttgtcacccaggttggagtgcaatggcgctatctgggctcactgcaacctctgcctcccgggttcaagcgattctcctgtctcagcctcccaagtagctgggattacaggcacctgctaacatgcctggctaatttttgtatttttagtagagacggggtttcaccatgttggccaggttggtctcaaactcctgacctcaggtgatctgcccgccttggcctcccaaagtgctgggattacagacatgagccaccacgcctggcccgcattgatcttaattctccttgcttagttttgtcagtcagcttgcaggacttaacagatgcctttctaagacacagagactgagatgtgttttatgtaagtttagtaacctcagtgctacagtaatgagacatgcagtgtccttttgctctggttcaggacagcacggaaggaggccacaggaaagagaataaatgaaacttgttacaactgagaaactacttctcattaagtttccccatggtgtcacctttatttaatatttatttttaaaattaatttctcctacttctttttactttcttcaagtgcagcaagtagacaattgaaaagtacctttacggccgggcgcggtggctcatgcctgtaatcccagcactttgggagactgagacyagcggatcacctgaggatcaccaacctgaccaacatggagaaaccctgtctctactaaatatatgaaattagccgggcgtggtggagcatgtctgtaatcccagctactcgggaggcaggagaatcgcttggaccagggaggcggaggttgcagtgagctgagatcatgccattgcactccagcctgggcaacaagagtgaaactctgcctcaaaaataagaaaagaaaagaaaagtaccttcacggtgacattatatttctgttacacagtgatgatggagaatatctcatttatcttccaaatacccctgtgaggtggctattacagagatcctttgcagaggtgatgagatgcacccataccacatatctcgttgggctcctgggctcaaatgatcttcccatctcagcttcctgagtagctagggctacaggtgcacgcccccatgcctggctaattgaaatatatatatatatatatatactgtagagatgaggtctccaacatctttctgtggcagagctgggattcaaagcctcatctaggcaccattttccttgccctctgagtcccgcagcccccagccccaaaggttactctctaacctcgcgaatgttgtctctaggtgggctggggagtgcgggtgatggcagaggcttactctttcccttacagaagatgttgtccctgtccaagctgacccttgctctgttgtgtgtctgggctgttagctgaggtcccrttgggtctccaggccccaggggtcttctggaggggtcttctggagaggtcttgcaaccatttcttattgcctccttctcagaccatccrggctaccactgaytactgccgccgccacaagatcccctttccccaagtagaagaggctgagctggatttgtggtccaaggcccccgccagctgctacatcctgaaaggagaaactggaccagtggtgatgcattttcccytgttcaacatagatgcctgtggaggtaggtgcaggggaggagcaggtgagaagccacctgtattagtccatgctcacactgctaataaaaacatacctgagactgggtaatttacaaaggaagaaggtttaattgactcacagttcagcatggatkgagaggcctcaggaaacttacagtcatggtggaaagcgaaggccaagcaagtcaccttcttcacaaggcggcaggaaggagaagtgagtgccagcagggcaattgccagatgcttataaaatcatcagatcagccgggcgcggtggctcatgcctgtaatcccagcactttgggaggctgaggcgggcggatcacaaggtcaggagattgagaccatcctggctaacacagtgaaaccccatctctactaaaaatacaaaaaaaaaaaaaaataaattgctgggcttggtggtgcgtgcctgtaatcccagctactcaggaggctgaggcaggagaatcgcttgaacctgggaggcggaggttgcagtgagctgagatcgcgctcctgcactccagcctggggacagagcaagactccttctcaaataaataaataaatacataccatcaggtctcgygagaactcaactcactgtcacgagaacagcatgagggtaaccacttccatgcttcaattacctcccacgacacttggggattatgggaactacaattcaagatgagatttgggtggggacacagccaaaccatatcaccaccaggccaggccgaatggagctgtgctgtgccctggggacatcttgttacgctccaacatctgatggttgagtgagtcatcctgtccacccttgggcctggaggatgccaggctgcctctctcggtcttgcatgtttatgcatgttgctgcctctctctgcagccttcttgtcctacctgaatatccaaccccttccacctgggcatcccacattcytcatccagtctcaggtgagcagctgcttggaaggcctagcatccaggatgggtggtcctccggggcctgattgtgccacttcccacagtgggctccttttagcttgtcaatcgtgtctcctgcgatgagactcccattagggataaattgtgtctgttttcttccttcatttaaygaacatttattggttacctatgctgcatcagccatggttccaggagaggcaggctagagtagtaaagaagacaggaagcagggggccaggygcggtggctcacgcctgtaatcccagcactttgggatgccaagccggggcagatcacctgagatcaggagtttaaggccagcttggccaacagggtgaaaccccgtctctattaaaaaatacaaaaaattagccargcgtggtgatgcacgcctgtaatcctagctacttgggaggctgaggcaggagaatcgcttgaatctaggaggtggaggttacagtcacccaagattgtgccattggactccagcstgggagacaagagcgagcctctgtctcaaaaaaaaaaaaaaaaaaaaaagaaaaaaggaccggaaggggcatggatcataaaaatatagataaatccataacctcatgtgtcaataaaactttatttataaagccaaagtagtgggccgactggatttggtccacaactgtagtttgccaagccctgatgtaaatagacaaaaatctgcagaattaattgtccaaactcatgatgccttttctttgttggtttggttatgcttcaggtgatattgaggcatggagtgacacatacgacacattcaagcttgctgacacctacactctagatgtggtggtgctactcttggcattagccaagaagaatgtcagggaaaacaagaagaagatccttagagagttgatgaacgtggccgggtaggtgggagaccatagtcgctctgatgcctatgctcgttcagtaagtatctgttggagaactttctctgcaacaggcaggagggytgcatgggtgaaaaaagataggcagtgtctcccctacttgagcttgcgtctcagcaggggacagaccatgaacagggtcaggagtgaatggttttctgaagagtgaagcaggctgtgttcgtttgctagggctgctgtaacaaaataccactagctgggtggcttcacagaaattgatggtctcatggtgctgggggctggaagtgtgaattcatggtatcagcagcgctggttccttctgggatctgtgagggagaatttgttccacgcttgtctccgtgtatattggtccgttttcacactgctgtaaagaactacctgagactgggtaattgatgaagaaaagaggtttaattgactcacagttccgaaggcttaacaggaagcatgggtgggaggcctcaggaaacttacaatcatggtggaaggtgaagggggagcaagcacatctttaccatggcagagaaggagagagagagagcaaagcgggaagtgctacacactttcaaacaaccggatttcatgagaactccgtcactatcacaagaacagcaagggggaagtacgctcccatcaatcacctctcaccaggcccctaccccaacacatgggaattacaatttgagatgagatttgggtggggacacagagccaaaccatatctctgtgaaaggaaaatgaaatctcaggaccccaattcactatgccaaaaggaaaaacttaagctgtggctgggcactgtggctcatgtctgtaatcccagcactttgggaagccaagacaggaggatcgcttgagcccaggagttcaagatctgcctgggcaacatagtgagaccaagtctctacaaataattttaaaaattagctgggtgtggtagcacaagcctatagtctcagctactcaggaggctgaggtgggaggattgccggagcccaggagtttgaggctgcagtgagctatgatggtaccaccccactccaggctgggcgacagagcaagaccttgcctytaaaaaaaaaaaaaaaaaaaaaaaaattaagctgaaagcttaattaagctgagtcatgcaagaaactgtctttccttttgttcctaagccacagataaaaggccacagatatctccacaggtaacttactctatcgatatggtttggctctgtgtccccacccaaatctcatctcgaattgtaatccccacatgtcaagagagggacctggtgggaggtgattggatcttgggggtggcttcccttatgctgttctcgtgagagtgagggagttctcacgagatctgatggtttttaagtggcagtttcccctgctctctctctctctcgatctctctctctcatctctcctgccaccctgtgaagaaggtgccctgcttccaccatgactgtattaggttggtgcaaaagtaattgcggttttgcaactaaaagtaatggcaaaaaccacaactacttttgcgccaacctgataagtttcctgaggcctccccagccacatggaactgtgagtcagttaaacttcttttgtttatacgttacccagtctcaggcagtgtctttatcgcagtgtgagaatggactcatacagttctagaagtcagaaatctgaaacgagtgttatggagcaaaacccaaagcgttagcagggccaactcctgcggaggctccaggggagaagctgttccttgcctttttcagcttctaggggccacccgcattccttggctcatggcccctccttcagcctcttgcttctatcatctcatctcctccttgctctgacctcccgccttgctcttataaggaaagatccatgggattccactgggcccacccagatacccaggatcctctcctcatctcaggatccttagattaatctcatctgcagagtcccttttgccatggaaagtcatgtactggccaggagccgtggctcacacctgtaatcccagcactttgggaggctaaggcaggcagatctcttgagctcaggagttcagaccagcctgggcaacatggcaagacaccatctctactaaaagtacaaaaaaatagcaaggcatggtggtgtatgcctgtggtcccagctccttaggaggctgaggtaggaggattgctgaaccctggggagcagaggttgcagtgagcccagatcacaccactgcactccagcttcgatgacagagcgagaccctgtctcaaaaaaaaaaaaaaaaaaaaargtcacatactcacaggctcyagggattaggatagggacatcattaggagacattattcaacctgccacaaagacacagacacaaccagatgacagaagccaggggaagagttggaatattattctgaatatggtgggaagctgctgttaagttttgagcagggaagtagctttatctgagtcaccttttcaaaggcccaccctagctcctgtgcggttggtccctaggtgagataattagcaccctgaggagcagtttgggtcaatgacctcagggtcgcaaggtagagggaagagaaagccattctgggcctctggaccagtctatgttccccagagagtttccccaaaagccctgcctggcatggggcagggcggttatttgctgctcatctgtcttctaatgaggggttgtatattagtttgctggggctgccattaaaaagtaccacagaggccgggcatggtggttcacacctgtaatcccagcactttgggaggccgaggtgggcagatcatgaggtcaggagttcgagaccaacctggccaacatggtgaagccccatttctactaaaaatacaaaacttagatgggcatggtagtgcacacctgtagtcccagttacttgggaggctgaggcaggagaatcgcttgaacccagaaggtggaggttgcagtgagcccagatcatgccactgcactccagcctgctgacagagggagattccgtctcaaagaaaaaagtaccacagatcaggtggcttaaacaaccgacacttattgtctcacagttctggaggctggaagtccaagatcaaggtgtgaacaggggtggtttctcctgagacctctctccttggcttgcagatggtgcctccctgtgtctacacatgattttcctctgtgcctgtccactccccaccttctcacctgtagaactcagggcttatttatgcttatttgttgactctctctcctcataataaggtgtgcagcagtgtggggtcaggaaccacatcactttgctcaccatggtgttcattctttcattcattgattccacaaacatttcctggatgcctgctagatccagtccgcccaggtcctgcagccgtggctgcatacaggtcagatgaggctcttgctcttgtagaatgtacctcctcccgggggggcaacatgacataaacaggtaaacaaagaagtcaacaggatggccatggagagtaagtgccatggagacgaccgaacgtgcggtgtgctgaggagtraagtgaaagctttttaggaaagggtctgggggtctgggaaggcatcctgagggagagacctttcacctggggctgaatactgagaaggggtggccatgaggaagtcttggggaacagaattctgtgcaaaggaaaagtaaatgcaaagtgtctggagtgggaaagaccttgatctgtgtcttacctatgtctataacattctgtactaatataaaggcatatctgaggctcggtaatttataaaggaaagaggtttatttggctcatggttctgtaggctgtgcaagaagcatggcgcctgtatctacttctggtgaaggcttcagagagcatccaatcctggtggaaggggaaggggggctggcgtgttacatggtgagagagagcaagagagagagaagggaggaaagcaccagtttccttttaacaaccagatctcaagtgaactaatagagcaagaactcactcattaccgcagggaaggcaccaacccattcatgaaggatccactcccatgatccaaacatctccctctgggccccacctccaacactggggatcacatttcaacatgagatttggagrggacgaatttccaaactatatcagtctattcgaggaacagaaggaaagctgttattgctggatcagggtaggggaagcacggaatgaaatgtgattggagagatggacagagatcagawcttgtgaattctggcaggtatcatgacattcgatgtaggccaaagagttacctcctagcccagctcctgatacatgcttaataagcgtagtgttggataaataaacgtttacgtggtaaaagtagatcacaagagctccacaggaggaggtggtggagctccaggtcttctcaatgaatgaaagaatggatgaatgtctttctcctaagtcatgtatgacctgtagaggcttccaggtcttctaatcttatccartgtgcaacactgcctacaaagcacagtggtaacttctaactttcctttctccccaggctctactacccgaaggatagtgcccgaagttgctgcttggcatagatgagcctcagcttccagggcactgtgggcctgttgrtctactagggccctgawgtccacctggccttcctgttcttcactcccttcagccacacgcttcatggccttgagttcaccttggctgtcctaacarggccaatcaccagtgaccagctagactgtgattttgatagcgtcattcagaagaaggygtccaaggagctgaagrtggtgaaatttgtcctgcaggtcccycgggagatcctggagctggagcatgagtgtctgacaatcagaagcatcatgtycaatgtccagatggccagaatgaatgtgatagttcagaccaatgccttccactgctcctttatgactgcacttctagccagtagctctgcacaagttagctctgtagaagtaagaacttgggcttaaatcatgggctatctctccacagccaagtggagctctgagaatacaacaagtgctcaataaatgcttgctgattgactgatggattagctgtgtgtgtgtgtcttggtctgccaccacccctgctgcggcccttttcaccctctgtgtaccctttacttgttcctttcttcccttccccctttcctttccatcttcttccatctatatctcagcaattaagcatggtggttccacagctgggtttggatcttacttctgttatctgcttaccatgagaacatgggcaagagccttcgcctccatgccccagttccatcgtctgtagaatagaccatcacggagcctgtatcctagaaaggcttaaatgagttcatgagtctcaagaccttagaatagttagtctggcaccgacggagttccagagcaattattattcatacaggctttccagaattaaagcaggactgttatgggatgaattgtgtgtcccacccccaccaaaagatgtggccattgtaacccccagtgcctgtgaatgtgaccttgcatggaaataaggtctttaccaatgtcatcaagtgaagatgaggtcaytcgtgtggaccctaatccacaatgactagtgtccttatgaaaaggagagatttcgccgggcgcagtggctcacgcctgtaatcccagcactttgggaggccgaggcaggtggatcacaaagtcaagagattgataccatcctgaccaacatggtgaaacctcatctctactaaaaatacaaaaattagctgggcatggtggcacacacctatagtcccagctactcgggaggctgaggcaggagaaccgcttgaacccaggaggtggagcttgcagtgagccaaatcatgccactgcactccagcctggtgacagagtgaagactctgtctcaaaaaaaaaaaaaaaaaaaaaaaaaaaaggaaagaaaaggggggatttaggggagggagagcattatgacaaatacctaatgcatgcagggcttaatacctaggtgacgggttgattggtgcagcaaaccagcatggcacatgtatacctatgtaataaacctgcatgttcagcacatgtatcccagatttgaaataaaattcttttaaaaaagkgggggggwtttaaagacagagacaggcatgtatacagagaggaaaccatgtgaacatggaagcagggattggggtgaggctctactgaccaagggctgccaaactattgccagcaaaccaccagtcatccgaaagaagaccttgatagcagaaggatcctgttcagaattctgtgttgcattcagtcgtagcttttttttttttttttttttttttttggacagagttttgctcttgttgcccaggctggagtgcaatggcacgatcttgggctcactgcaacctccgcctcctgggtttaagcgattctgctgcctcagcctcccgagtagcagggattacaggcatgtgccaccatgccgggctaatttttttgtatttttagtagagacggggtttctccacgttggttaggctggtctcgaactcctgacctcaggtgatctgcccacctcagcctcccaaattgctgggattacaggtgtgagccatcgcgcccagcctcggccatgtcttcttagtctcctccaatctcgaacggttcctcaatctttccttgattttcatgaccttgacatttttgaagcttacaggccagttattttgtaaaccatccctccatgtgggttcgtctgacgtctgattatgatgagattcaggaatcttacagaagcgatgctgttctcgtgacatcctgtcaggtggtgtgaaattccaacttgtcacattactgatgatgtccactttcattgactaagatggtgtttgccacgtttctccactataaagtaactcctttgaaattggtattttgtagggaggtattttgagctctgtaaatatcaaacttctcacttagctttttatttatctgagtatggactcctggtttcttctgtggtcctgtataatttgttactatcattatttattttgactctcaaactgcccagtatggccaatggagcttcttcaagcagactcctgtgttctttccacatgttctcacaacactttgagcaatttcttgctttaagcataggacgtttgtaggctcatcttgttctttttttgctctagacatggaatcagccaaatttcctaggcactctggttccatttggtggagaatggtatatagaagtcaagatttggatgctagtggtgctcattcgtatgggccatcattgtttctatgttctcttagtggagagagctagagaatatgtgtacaaatgttcctatacacactgaaactatgtgtttatttttatctctctatgtataattgagatccatgaggacataccaacgcctccagttatagtccaacaccacagggctcattcgactttcctcctttctgtcttagtaactcccttttccaacagtaggagacctggcccccattccccttactcactgtgtgtagccaatttcccttttcctttgccatttcacccctgtggggatgtctttcccagcctagtctggcttcaacaccatacaccatgctattcccatgagtggacatttctctctctgcttgggttatgacaacccatgccagatcccctctatgtggcctccttcctaattgccttacagtgcaaacctccaccccagacaatgcctgcatataaatgcccccgccccactcagctcatgttccaacactgcacaccaagctgcccatctgtggatttatccccaccatctccagccccaacaccctgggtcatgctgcccctctatgtggacttctcctcaccccactaccccactggaatgctggctctccacgccagatggcccccagccccctcctcccctaaccctacctagtgtggagtcgcaaaacccctttgggctttgacaccaccataacttcacaccctccctgacacccccaccttgctttttccctctaaatcattcaggaaagacagaaggaaagagatgaacagaggaagagcaaatgccatgctcttagtcaccgtgtacgcccacttcctgaagtccatgcttgcatcctgctcactctcacacattcccgactcacccaggaaaactccctgaggccaggggtgctgagctctccatctcactgcccagaggccagtgttggagtgacccttcacatgcttgttggaacattgaataaatgatgccgtctgctctaatcctccattttcttttcttttttttctttttttttctttttttcgagacagggtctcactatgtcagccaggctggagtacaatggtgcaatcgtagttcactgcagcctggagtgcaatggtacaatcatagctcactgcagccttgaactcctgggctcaagcaatcctcccatctctgcctttggagcagctgggactacaggtgtgcgccaccatgcacggctaatttttttattttttgtaaagacagcctctccgtatgttgctcagctggtctcaaactcctgggctcaagcaatcctcccacctcagcctcccaaagcgctgggactacagacatgagcaccacatccagcctctaatccccatttataaaatgcactttccaattccactctggggataaaggcgtcacagaacctgactctgcatttccccacccatatcattcaagccagatggggaggcagggacagctctggtccctccccaacccgggtagagatttccagcccagctgtcacagctctaagacaccgggaccgaaggagaagccaagagaggcaggaagaggtggcaaaggagtgctggagaagataaggaggctgagctccgacagggagcagggaggaggggccatcttgagactggtgccctgcgagctccaccccacccctccatgcagttccccatgggccccgcctgcatcttcttgaggaaaggcattgctgagaaacascgggtgaggtggggagtgagggggaagggcggtgggcggggcaaagggagcaggggtgtgggacaaagaaggggacatgatggtgccacagaaccaggggaacaggtggatagagcaggagctgagaaggtataagaaattccaaggaccctggtggggtcatgtaagccagtgagataaatgggtgggggtaaaatcaaaagtcaggagcaaagagaaggagagaaaaggaagaaaaatgaaaagggaaagtgggatgatgtcattgttgagattaccatcattcttttctatggatgctcattgtgataatggtggtgatgatggtggtggtggtgatgataatgatgacgttaataacaatagctgccacttattaagtcattgttctgtgcccagccctgtgcaaagggatttgcacacctgatgttatttacacctcagaacaactcatgaggtcagtgactttcattcccattttacaggtgaggaaagtgaagctctgagtcatgaagtcatttgccttaagcttacacagttagtaagtggcagggtcggccaagtatagtggctcatgcctgaatcgcagcatcttgggaggcagaggcgggaggatcacttaagtccaggagtttgagaccagcctgggaaacacaagaccccatctctactaaaaatacaaaaaaatagctcagcatggtggcatgcatctgcagtcccagctactcaggtggctgaggcaggaggatcgcttgagcccaggaagtggaggctgcagtgagccctgattatgccactgcactccagcctgggcaacaaagtgagactttgtctcgttaaaaaaaagtaagtggcagggtcgggtttgcttgattcctgtgggcatgctttttaaaatttttttatttttccatatataccaacttgtccagatatgtgggcatacttttcattgttaggctttaagatcaccaaaaaaagagaataaaaaaggccaggcagtggctcacgcctgtgatcccagccctttgggaggccaaagcaggtggatcacgaggtcaggaggtcaagaccagcctggccaagatggtgaaaccctgtctctattagaaatacaaaaattagccgggtgcagtggcaggcgcctgtaatcccagctactcgggaggctgaggcaggagaatcgcttgaacccgggaggcagaggttgcagtgagccgagttcgtgccactgcactccagcttgggtgacagagcgagactgtgtctcaaaaaaaaaaaagagagagagaatgaaaaaaagggtgataagggaccgcaaggaggggatcagatgaaagagaagctgagggaaaggctccagggataaagggagatgggaaggctaaagagaccagaggtcagtagaatttccttgttaacatgccatgtatatgtaagcccaacccttcaggtatgtgcaggagtaggtggggcagcaataactggacattctcagagtgtttaggaactggtcatgctggcactgaccctcctgcctgaaagccattgaatgctgtttccatgcacagagattctaacctttggcaggaagattggaggcaggtgagaaaggagtgaatgggggctagtgtgaagaattctgacttgggagtcaggagccctgaattcaaatcccaatactgtgtctgacttgccccatgacctccagggagcaggtgaatgccttcctcccttgggaggggatctgctgcttgtgagctgtgtgaccttgtgcaggttccttaacctctctgttcctcagctttctcatgggtaagatggaaacgagatgtagatctgcatcacagagcagtactgaggtttaaatgaaatgattgtggaaactgcctggcacagagtcaccactctgaatgagttagctgtggttgtgaagtctcacttttttcatctggagattggactccccagtgtttaagaccccctttgacacaatgtgatgggtgtttgtctcagaaag

SEQ ID NO: 5613 - DNA, 49513 bp, Homo sapiens
  misc_feature (1)...(49513): n = A,T,C or G, or insertion/deletion polymorphism (see Tables 1-2)
tcaaattcgaaaatctggggtcacaagaatgaggcatgaatttaataaaacaattagtttttcaccactaaccccagggaccaggaaaattatcctctgtagtagtaagaaattcaaaggtatagttaagaaatataaaccttatttttctccactgtaattcaattatcaaactctaaggatgtttctagtatagctctaattttgcaatagtgcactgggagaaagccaatctgtaaagcaagtttctatgtcattggaacagatcaaggtccaaagtgtctctctctctctctttctctctaatgttcttgtttaatggaatgcactttcaaatgtaatttatgccttgctttatggatcacaaagatattttgttaaatatgccagatgataaatacttacaaattgtttatcaactcttataccatcaccccaagaagaaaatgagctaagattttctttagcagcaaaggtgattatctcatccagaagtagctgggtgaaaattcacaaagcaaatgttattgactgcctatcagtctctgagtatgaaaactatttccctctgagtaatcaaagaaaatccctgagatttcttgctgctcttttctgtcttccagataggcctagtggtgggggttgggaggaggtgggatttgccctcaatctgtagactccacccaatctgaggcatggattgaggcaaccagccagcagagtccaggaagctggcataaccaggcctaaccaggaaggatgcagtgtctcttctggcttctgcaatctttggatctgacctcttttatgaagtttgccctgggatggcaggactaaccctcgcatcacagcaggagctcccaagagatattttttaccaatccttctcttttcatgctcgtacccagtaccaaagtctctcatgttttctttccttcttttgctcttaagaatcccaaaatccctggggccaggaaggccttgggcttggatcttcaggcagaagtgggctgttttcacaataacctgtcacaaaacaatgaagtctttctcacccactcaatatttccaagctccagctccaatcccagaccatgtgttctgaaaattccatcttgaaagagaggtagttgatgcatacaaggttttatccacctaaaatataagaaggaaaaaaatattaaggataatagtgtttgttatgagtggggtgttttacaaacatttcttttatccttacaacaatcttgtgaggtattgccatttctcagttgagaaatctgagatctgagataagcaacttgttcaggattatactaatattatctggttgattgagcccatttactctccccacctccacccccaccccaaaattcccttcctcactctctctctgtcttttcctccgtgtttccaactctcattttctagatcaaagttcaaaataatgaaaacagtgggtaattagcttgtgaatagatacaggcttagctccattgcactctaagcacctgatttatatttatgtgcttttgtccgtctccacagacaagttccacaggtttaaaaaatatgctgtgtttgagaccagcctggccaacatggtgaaactccgtctctacttaaaaaaatacaaaaattagccaggtgtggtggcaggcacctacaaccccagctacttgggaggctgaggcaatggagaatcgcttcaaccgggagggtggtggttgcagtgagccaagatggtgccacttcactccagcctgagcgaaagagcgaaactccgtctagaaaaaagggggggctttgttcatttctgtttataatatctggaagatcgcctggcatgtaggcatgtataaggctttcaataaatacttgttgaatgaattaacggacaagcagatgagtgaaatagaaaagtctacaaatagacctaaatacataagggaatgcaaatgatagagttcatattttaaatcagcagaaaacatggattattgcaatgaactgaatgtttatgtccccctgaaaattcatatgttgagaaaccctaactcccaatgatacagaagggctggactcctgggtaaaccccacccttaagcttgaaacctcaaccctaagtgaagacaactgaccctgtttttctgcccaaatgttgcctttttggcttgcccctgcctctatcttatgcccatgaaagacttcagctggcatggcaacacaagcagctgagcatcagtgatataagtggctgagcgtcaataatacaagtggctgaggagcaaatagagaaacaactgagtgtcagagactacaggtagacatgactaacttcagaccttgtggcttcagagaggggaccagctgaagatggctgggcttcagggagtgatcatctttccatcccctttccagtttccctttccactgagagccggcaccgctcaataaagtcttccatattcatcacctttcaaacagttcatgtgacctgattcttcctggatgctgggcaagaacccaggtgccgagagggcaggggctgccaccctgaccctccamtaagctggttggcacttggccatcctggatgcagagctgaaagagcattggttgaatacacttgaacaccactacagggttcgcacggagcctgctcccaccagagaggaatgcccagcggattccagcattcagttcactcaagtttccacacttggttgcttgcatactctctcccacaaggagtggccagcgatgggttgaatgaaacgagccactccagttcctgcctgcaaagggggtcaagagcactgtcccgtctcatcaagggtattaaaaggtggagttggccaggcgcagtggctcacaccagcaatcccagcactttgggagacctaggtgggcggatcacccgaggtcgggagttcaagaccagcctgaccaacatggagaaacccagtgtctactaaaaatacaaaattagctgggcgtggtggtgcatgcctgtaatcccagctacgccagaggttgtggcagaagaatctcttgaacccaggaggtggaggttgcgcagagcagatgcttctttctcttgattgaaagaaaggaaggatgggcatgtagatatatttgagagaggagatgggaagttgaagaagtttgcagcaaattgagataagcacaggatggctagttttgaaagaaaataaataaagctcttgaattaaaaatgtgattcatggcccacatagttttagttcataagctgacactcaacaatattaacattaaattatagattaatttgactaaatattttccctttgataaagacacctatcacccaaggaatgtactttacagaagtaataactttcagtttcatgtggagtttaagcaaatacattcaggtttctatggaaataatgttaaacctatgtactcaaataaagctaaaagtgttgtgttttgtttttttctgtttgtttgtttctgagacagggtctcactctgtcacccaggctggactgcaatggcgcaatctcggctcacagcagccttgacctcctgggctcaggtgatctttgcacctcagcctcctgagtagcggggactgcaggcataggccaccaagcctggctaatttttggtagatatagggttttgccatgtttcccagagcctggcctagaacttctggactcaagcaatccacctgctttggcctcccaaagtattgggattacaggagtgagccaccgtgtctggccttaaaagattgttaaatggagaccaggtggaattactatggcaaagggcatgtattgccagcaaaatcttcccatgaaggcttatcttaccctaaatacaaatcagctatgaagaggaataattctgtattatgcaagcaaaatggtttagcaatcatccttgtgacattgtccaagatctatattacagaattacagatgcttagatttctttagtctaagactgtaatgcactaaaacttatgcaacacttctatatttgattagataagttttgctttgcaccaggggaaataaataaatactttttctaatgagctctgtatacaatgactataaaaaaaaaaaaaaggagagccctagaagataaattttataacttttcttttactttgagcagtttttccttataaatgtgtatgattaatattttggtcatattatattataggtatggctcatagagaagcaatttagaagcagattagggtttgaagttggaagcttaaacaaatccattcttaatcctgacaataaagtttactgtcaaaattgttggttacagatacttaaattgctatttatttttttaaagaaaatgttccaaaacataaaacagtaactagttttgagaccattgtcctctataagggaaaagaaaatatttcagacacatttaacagatgccaatttcagtttctcaattatgtcatcaaggtattcttcaaaccaaatataaaaatatatatataatttctaatcactcactttttatacatttataaacaggcagatacagatacagatacagacacaggcagttatttgggttaaagaagctggcattttcatggggtttagaaaggaccgtgtagtccatgacatttactaccaggtatcagaggaaaagcataagcagttccttttcttgaacatttgccttctaattgaataggcattggaatacacaaagtagagggtttttttaaaggatttgttctttcttttatctactacaaaatatgagtatttctcaatgatgacaataataattaccatttatcgaatgtttattgtattcctgtctttgtgccaaccacctgacctccgttatctgaaaaatctttccaacaaccctatgacatagatattgttattcttcatttacaggtgagtaaatggaggtttacatttgtatggaacatgttctgctacttgagataatgggaataggagcctaggagggctaaaagcaaggagccagcaagtctagacacattccagaggacattatgtcagtcatgcaagccctgcctcagctttcttcccaaccctcagccttttttcccaacagtatataaataatgtggtgttcctttcaatacaggtgtctctaatgctagtttgttccattcttggtgaagttaatttgaatcacatttggttagcatgtttatcagtttttttctactgagtttccttttgtgaagtaagaacaaatatgtttatgaatgtagagttagctgtgctaaaattaaatgaaaagtcaagcaaactacccagatagtttaagccaatcacccaggatttcatgaaccctttgagccatttatgtttcccttgagggatatttcacatcttttacctgagagttctacagggcatgcttttattagttgaaatgtcactgagggcgagagtaattgttcaacggatgtacttgaacttggacatttaagaattaacagaacgggctgggcgcagtggctcacgcctgtaatcccagcactttgggaggccgaggcgggaggatcacgaggtcaggagaccgagacctttctggctaacacggtgaaatcctgtctctactaaatcctgtgtcggattaattcgttctacttgctattaccaataaatagcatgggctcccagagctatgcctggctaactctatcaccttcaagggtttgctcaaactattcagcctactttaagtaaatcaatttccaaggttacaaaataaacttcacgtacatttttatggttaggtatttgcgcgtatttgggggctccatagctttcatccgttactcaaagcgcttcaggacgctaaaaaggctcagagctgcttcgataaacaagaaagaatgctgcaagcaaaggcagcagtttcgctgtaaaatcctattgctgacagccaagacgggcgtattccctcgcgaccagcctgtggcgtggttggggctccggaagggcgcgcgcgagcgcttttttgggaggacaccacaggtggacgcctcagctgatcgtcctccctcccggggaccctgccccgagtcgccgagtagccgcagagtcgcctccgtcsccccgccgcccctgtgtttcggacatggccgcacgccttctccgagggtccctacgcgtcctgggcggccaccgtgcgccgcgccagctgcccgccgcgcggtgagtgccagccgggacttccgcggctgcaggccgggaggctgtggggtggggcagcgagtcactcctgtcgctggcttgaagcagggcggtgcgcgcgcggctgggagtgctccccaactccggcgccgggctagagctggcctcctttcctggatcccgcggactgggtgcaaccagcatctgggcggaggaaaaaggggtgtcagccgtgcmgccccgagaacagaccgccgagcccacgtcggggaaagccgaaagatttctccagaagttcattccggagccccaatccaacccgtctagttcagcggcctgcagtgggacccgggagcctgcgttttgggaggaggtggtcaccccctgggccsggctgcaggagcgcgggctgcgatctgtgtcccagttcgagctgtgaacccggcgttccccacggcttagactcgccgcgcggtagtgaacttgggacccggactcagtgcccgggctgcggcgcggaccagaattgtccaggacaaactgggctagaaatgacctggcgagggttccatcaaacaaggaaattagctttagatatatcaacaaatctaactaaatacagaggattaatgaagacagagtctaagtagttcagtgactactaaggtggtgtttataatatgatcaaaagtttcagatactgtctgatgcataaaatctattcactgggtaaacaaattggaagcatggagaattcattatttaataagggtgaaggaactggcaaatttgcgaatgacagcattggtgtaagctactctaattttatttgagagctatgaaacaaaatgcctacttttcctggggagatttgggaagacgtcactgagaaggtgacttttctttaggatacatacttaactcttccttggaacattataagacagtgatcctcaaacttttttttttttttttttttttttgaracagagtctcactctgtcgcccaggctggagtgcagtggcgcgatcttggctcactgmtgcaacctccgcctcccgtgttcaagcaattctcctgcctcagctttcctgagtagctgggactacaggcaygcaccaccacacccggctgatctttttagtagagacgggggtttcaccatattgaccaggctgggctcaaactcctgacctcgtgatctgcccgcctcggtctcccaaagtgctgcctcaaaactttttgataacagggctcccttatgctcttaaacaggacctcaaaggacttttgtttatgtaggttatatctatccgtctgtcgttatcgaaaggtatctacataactgagaaactttacagatatttagtttatttaaaagttacaataagaagctcattacatgttaacataaataacagtttttatgaaaaataacttttcctaaacagaaaaaaagtgaaaagagtgacattgttttacatttttacaactcccttaatgtctggcataatagaagataaccagataactatatctgcttctgttttatccattggcgtaagttagtttgattgaagcatggcaagaaaatctaccctcaaatagagaacactggaaaaagggagacctgagagaccctctgaatgggctggggggctacagttttgttgtaacagcttttttacctttaatgtgcaaaggaatcacctgggaatcttgttaaaatacagcttctgattcagtgggtctgggatggggcctgagattgtgtatttataaccagcttctaggtgtgtggaaggtgctggtggagattgtctcccttttaaaatgtaggagactttaaaaaaacaataatagcctagccaataagattagttgcagtttattgccttagagaaaaaaatgccaatttttccattacagatttcttcatctttagactgagaaatacatgttgcaataaacttgctgccaagtgttttgattttcttccctctgcatattctctcttgaccacctttgactgacctgaaagtctttattcgtttggcatttcttttgctttcctatgtctttatatattttacttaaaaatattgcagagatttccttaacacagtacaggctattcaattttaagatccagtaagactcgattttaaattctggctctattgtttactcattatgttgacaaatgattcggtgtcttacagccccagtttcctaatctcagcatatttttttcctgagggaaactctcaagtatggaaaatctatatggacaaatacgtgctttataattttatctctactagcaagaaaaaggagccgatcatttccattatagggataaagtagatgttagtttatttgatgcaacaggacaatggtcaaggtcccctgcatgtcctggtcccctgttatctcttcttcctagaatctctggcctcatctactcttctcagcccactctggctacaattgcctccttgctctttctagaacacatcagacaccattcagacatacagcctttgctctagttgttcttttgtcctaaaattcttttattctagaggtatgcctggctaactctatcaccttcaagggtttgctcaaatctcacctttctggtttaacctaccctgactgcagcacttttttttcttttccttttttttttttttttgtttgtttgtttgtttttagtgacaaggctcactatgttgcccagactggtttcaaactcctcagctcaagcaatcctcaggcctcggcctcccaaagtgctgggattacaggtgtgagccaccaagccccgcctactacattatttcatacggcaacctctgtctctgcctccccccaggcacatactcctgatcccttctctacttttctttctccataatacttaccaccttctaaggtattatacaatttgcatatttatagtttattgtttattcagtttccctttgttagaatgtaagcttaaaagccaagatctttgtcctcatcttagtcctttgttcgttattgtatcccaagttactagaacagtgcctggcacagaattggcactcagtaaatatttgctaactaaatgaatgaataagccacaaaaaaaatgatacttagggaaaacttagaaataggttgtaatagcgactgggcacaatagctcatgcctgtagtctcagccctttggaagctgagatgggtgtatcacttgaggtcaggagttcaaaaccaacctggtcaacatggtgaaaccccgtctctactaaaaatacaaaacttagctgggtatgtgtggcaggcgcctgcaatctcagctactacagaggctgaggcagaagaatggcttgaaccgggaaggcgaaggttgcagtgagccaagattgcatcactgcattccagcctgggcgacagagccagactccatctcaaacaaaaaaaaaaaaaaaggaaagaaacatgtaatagtaaaaagttatttttttaaaaaccctttaagtctactttgattaattacatgaaatagatcttttctggataaggactagaaaagaaaaggcagagtccaactaaggaagaaatacactaaattagaatttaatgcaaaatagaaaaagcatcctttggcaagatttgaatatatgataagttttttagatgtgaacttgaaaatgtacaaaatgatgcatagattttcaaaatttctttcaggggtacttcaagggtaaaaaaggctgaagaccactgaactaaaggagctacaaaactgtctcatttgaagcttggtgtgggagggatgggagtaggtcttaaataattccattttacagaatctttatcagagattgatgggtatttttatctccacccagattggctttgtaatgtggcgattacatcaacatggtttgcatcttatacacctgcaatttgaaattgtgtgattctggttaaaatactaattttggaggctttgcattattttaaacattgtatatgatatgaaaatttatcagtattactctaccgtactatttgaattttacataatgtgatccatatgtcacctgacaatactacatttcacctcaagtcagacctgtggttagttctaggcatcatcttctttaaggatttggagatggagaccgagttgaataatgataaggtacttcttaattccagctacatgaggtagatcccatcaaaagtggtggcgcccaaatttgaacccagctttgtcataattcaaactctttctacttgcctctcaagtttctctgtgaaagaaatccatgttgttcagtggcactaatttggatatgaagagtaacaattcacttacttttcctattgcatatatatatttttaagatgttctcattccggaggggaagaacgtctagaaaytccttctgctaaaaaattaacagatataggaattcgaagaatcttttctccagagcatgacattttccggaaaagtgtaaggaagtttttccaagaagaagtgattcctcatcactcagagtaagtggcacattttcctctaatgtaatgtatactaggggtattataggaccatttcctagaatgccatatattgctatacagaaaacatagtatgttcagggctttattaacatttttactgctcttcactgtagtactataagatcccaggattcttagagctttttaaatgaattttaaaatgtactatacacaaataagaaaatttgaaaatttacaacttagtctaagagtagtgtttttgaaaaccatgggtaagtggtaacaaaatactagtcaatttcatagtctttctttttctgcttcatgaattaattaaactgtaaaaacccaaaaagtcagcacaatgcaaaccttggtaagcaattggttacctctggatagttcttgattaactaattattattattttattgaccagaaacttatctatttctattacaataagattttgcttcatttccaaaattcactcaatgctagtacagatgctcctcaatttagtatggggttacaagttgaaaatatcataagtcaaaaatgcattgttattatgttaacactgttactatgttattataaaaacaaaaaaattctcggcaccgttattatgttagaagcagaaattagaagattagtaaaatgaagagagaaatggttcaggaacatcataggtttgtgaggttttacacacctagcctactaaaccccatagtttaggccagcctacattaaacatgctcaaaacaattacataagcctacagttaggcaaaatcatctaacacaatgtctactttgtagtaaagtattaaataactcatgtaatatattaaatatatttaatatatgttaaagtgaaaaacaaaatggttatatggatacttgaagtaagcatgttttcgactgaatgtgtattgcttttgcaccatcataagtaaaaaaattgtaagttgaactgtcataaagtacagagacatccgtactttaaaacatttagaatggtttttaaatagcattaaaagtaacttccattaggtttttactaataccttcttggtaagaatgaccaaaataagctaaactcagaagccagaagccatgactagtcttcggtgaaaagcaactagcttctgttttttgaggacttgtttgtttgtttgtgtgtttgtgtgttttttaagacatggtctcactctgttgccaaggctggagtgcaggggcatgatcatagctcactgcagccttgaacttctgggctcaagcgatcctcctgccttagcctcccaaagtgctgggattacaggtgtgaaccaccacatcgggcttcaactagcttcttaaagacaaaagagacattgtacactttgctctggtaggatctcttgtttatttctcactgcttttaaattttattccagaaaaaatgttaagaaggctttgaaataaaataataggagctgacaaattttaagtcaataataaaaatatttccaaagctactttaagcaagaactgtattcaaaacacacatgataatccaagtcttaaaaatttttgtagtgtcagtatcttcaaataccccatatctcactataatccacttaaaaatacaaaaattctcagatattttttcactatctccaactagccatctgtttcctcattctgccattctcatttttaaagaagaaaagctgaggttgcctaccttacacaaatatctaattttttcagaagttaatttgatatagagccatggtgtaaggtgcttctgctctcctgttcttcctatttaaactgtaatgaggttccctactttgtcagcttttgtatgcttgtaccataagttcagcactttaaggaaatatgccaaggagaattgccttttacaatacaggttaggcaaattcccatgacaacatgccataactaagcttgtatgtaagagtacctgctgagcaaaactacatcaatgaatatcagtgggtataattttcaagtccaataaatagtcaagatgggggaagacaatggcaaatataaataagaggagagggctgggtgcagtggctcatacctgtaatcctagcgctttgggaggctaaggtttgaggactgcttgaggccaagagttcacgaccagcatgggcaacataataagaccccgtctctacaaaaaaaaatttttttttaattagcctggccttgtggcaggtacctgaagtcttagctgctcaagaggctgaggtgggaggattgcttgaacccaggattttgaggctgcagtgatccatgattgtgccactgcacaccagcctgggtgacagtcctgtctcaaaaaaaaaaaaaaaaaaaagcagaaaaaaggaggaacagaagtgataaaagagtcagaggcaaatagaagcatatggctaatgtaaataactacctttaagaatgcatttctacacaaaatcattcataagttcaaagttgtggccatttaaataatatttaaaaattatctgaatttaaaatatttgttatttgcagatgggagaaagctggagaagtaagtagggaggtttgggaaaaagctggaaaacaaggactgcttggtgtcaatattgcagagcatcttggtggaattggaggggatctgtactccgcagctattgtctgggaggagcagtaagtatggagacttttaaggttgagtcttgttttgtaaacacaccactcacctttctgaaatgaccaaacaaacaaacaaacaaacaaatgttttctaatcttggaagattgaaaattcagtgtaaaatgtaaaagattataccgctcatgcactcttgcacattttttgaatgtgggataataagaaaatccttttaagttgctgaaataggtgctattgaaaattaaagagatagtttttttttcctgtcaatgcttatggttacttttcccccttagaaaagatatttgaaagagaacagcagagtagaaatatacttccatcaaatatattagaaatttaatatacaagaacaaataaagattgcagttgaaaaatgggcaaagaatttgaagcaataattcatcaaaaaagaaatgcaaatatgtttttttaaatgagaaaagttcatccttagtaacaatcaaatgcaaattaaactgatctggaagtatcattttgagcatctataaaattagtgaaaatgaaaaatcctaatacccagtgctgacaagattgcagtgaaagtgacatacactattggtggcattataaattagaacaataaattttggggggattaaaaaggtgaaaacatattttaaaaaatatgttcctgctctttgacatagaatgccactttggggaatttatcctaaggaaataatttaataggaaaaatagatgctgtgttcagaaatcattgtcatgttaggtcacagttctccaaatgctgaagcaatctaaatgtccagcagtgggagaatggataagtaaattatggtacataaacaacttggaatattttgcagctatttaagattaaaatatatgtaaaaaaataggattttgttgtgtcatataatttatttttaaattttaaatttttatttgtgtgtgtgtatgtgtgtcataattttaaaagaaaatagcaaagtacaaaattcactccatgactccatgttttgttttgttttgttttttggtccttttttttctttttttctattttttgcttttttattttttatttttgttcttttgtttctttgttttaccaagactccgtcttattagaatatatccttatggcaaaggtaattagaggaatacagttattattccactgtgttagaggaatacaactgcaggtgattcatattttaaaatattttatctctcaattaaataagtgttcattgaactctggtagaccactgttattgtgttggaaccagaaattttaaaattagtaaaaacaaaaagagaaaacactcaggaatgtcataggtttgtgatgagataggccactaccaaacaatttgataggaccttaatacattgttgttataatagtcgttttttattgctattttatgctctaatttttcttcttttttcattctaagagcttattcaaattgttcaggcccaggttttagtattcattcaggtattgtcatgtcctatattacaaaccatggctcagaagaacagattaagcactttattccccagatgactgcaggcaaatgtattggtgcaatagcaatgacagagcctggagctggaaggtaagttaatatttagttggytttggattcttggaagcagtgccttaacattttcttagtacttggttaatacatagactgagctatatgctaggaggaaggcaaagatgaacacgggataattcatgacctcaagtcggaaaataacaataaagcggattataatgtaagctatgtttgagatattaacatagttttatgcaaagaaaatggtagtgtgtaagttgaattttcaccataatgaattttaggtgtaggatgagattcacatgtaaatgccaagcagtttgttacagaggtatatttggaattctggagacaaggatggagtagcaataggttttaaaagtctttcatttataagagttgatacaataggaatgaataagatcacatattcagttatttgctggttatttcataagtgtcttcagtgtgccaggtatacagtagtgaacaaaacagatgtggcctctgtgcttattgaggagaagggcaagggcaagaaataagcaagtatatatatttgtagctataaattatgataagtactgtgaaggaaatgaagtactgtgaaggaaacaaagtagtgtgctgtagactaatggtatgtttgtgtttggtgggatagggaaaaacgaatttagatgtgaatgctaacaaaggcctataaaaagtggttgtatttaaactgagatttgacaaatgagaagaaaccagttttataagaatgggagaaagagcttccacagagtgggacctgatcctcaagaggaaaaatgaaacacaaaaaagggaccaaggaggaaaatctgggcattatatttcatttggaactgtacaaaagaagatggagcaagagagacagaaggattgagagttttaaagaaatctagacatgagtaggaagagaagtcagttggaaaggctgtaggaaaggagaaagwagttagtaatgtcaaggccaccgtgatgttgagaatggagaagaggttttggcaggcctgatgatcctttgtgatttcagtggggtggaggggcagaagttaccttttatgggagtgaggtggttgttgagaaaacagaggcagagaacacaaagtaatctttctcagagctgagtggtaaaaggaaatgtagagagggggcagtggtttgaggctaactggtaagggaaattatttatgttaaagacagcagcaacttgtgggtcaacagaaagcaaatagtgcaaagaaagaacttaaagatgccaaagaagtgtaagtgaaaatccaggaattgtttttgcggaggtcaggccctccttttttattgtaagattttcttttctgacagtgttatttatttttaaatctcttaatattctatagcatgacttgcaatatgtttacattgtatttatctttttaagatataaatccctaattataggtcaatactaacaattttgtcaaagattaaaggtttctgttcacttctgttgcctacaagtgtgatctaaacaagtagaaatttaaccttgttccttaaaatttgcttttaatttcattctctaagataactacctgactgactgccaatattcagattgagttgtattagctctgtggttagcatgttccacttccagctcattgcatattagctctcaaaaagaggctatagaataaatgaaatcttgatttatctctaatttatacatgcaaacaaaggttcatgtgatttttgtttaaagtctctggccttatctgtggttaagtgtawataattaagaaggaaacctgagaatgaagatggagaaaataagcagatttctttctttctttctttctttttytttctttctttctttctttctttctttctttctttctttctttctttctttctttcttttttggaaggtcattgaaagtcatgaraggatatagtaaataagtcaggtatttagagagatgagcaaagagcccatgtgggtaagagaatataagaacagagaaaagccacagatgaagaagagtaatagagtgttgaggaattacggaattatggcatgaaattggcatgaaatagggaaaaacacgtgggaagaaaagaagatagaagatggaatatggttcattttgcctgccctcagagatggattgagcactgtctatatttttggtttgatttggcctccacagaaaaaaatgttgcaattgttgaaaaacatccagagtttcactggccctttccccttccatggaggaaagcttcattatatataattatgtatctttgtatgttgtattactttagcattttataaatgctttcatgtttattttattattttttaaagaaatagagatggggtctcgctatatttcccaggctggtctgaaactcatggactcaagcattcctcctgcctcagcctctcaacatgctaagattataggtgtgagccactgcacctgatctcatgttgattttattatatggctattataataagatatatggaatatagagatatgatttctgtataagaaggaaacagaaaataataaatgaagtattttgaccaagttcatagagcaaattgttgacatctttggagccagagtgttctgacaccagctgtgtgatcttgggtaaaaatctctgagcttcaatgtctcttatcaatgaaattgagaaaatgatactgaagaagattattgtgagggtctaacttgttggctttactaagtagtatactttttcatttttaatatttcatatataacattcaaaaatttaggaaaaatttacaaactgagctatgtcattacctttatttcctttgatatgtccctgtatagaagaattttttttttttaaacagtctcgctcttgtcacccaggctggagtgcaatggcgcgatctcggctcactgcaacctccacctcctaggctcaagctattctcctgcctcagcctcccaagtaactgggattacaggcgcccgccaccatgcccagctaatttttgtatttgtagtagagacagggattcagcaggttggccaggctggtcttggactcctgacctcaggtgatccgcctgtcttggcctcccaaagtgctgggattacaggcatgagccaccacacccagctatagaagaattgttttaataaactatgtacagacattagttaccgatactttatacatacttatgatgaaaaatatgatgttagaatacaatagcattcaggctgggcacagtctcttgtttatagtggaggtcggtcatataggcaccctctgcctggcatgtaccaaaagttcagatccctaaaaggaaagcaggtattcagcataagccaaattgtttgcgcaaacagttcagacagtaagccactcttatgagtactgggaatggtgggaactctcctgaaatccagattctcagatgttagccacggacaatgttgtaacaggcctttctaaggatagcagtctcaggcctgctatattaattcttttctgtatacttggcattttaataatataatttaacaaatgtttattgagtgcccgttatgtacaaagcagcatgctaggcaccaagcatataaatatgatcttgatacaccacatgttctcaaaaaacttgagtcagataagtgtggtaggtgggaaagataattcctttttattataattgaaattcaaagtaaatggctctaagagagtatatttgttgctttatggcgtctgtgacaaattagcagagacttggtggcttgagacacagaaatttattctcttacagttctgaaggctaaaagtccagaatcagtattgttgggcccaaatcaaggtatcaggagggccacactttctacagaggttataggggaggatccactcctttcctcttctatttcttggtggctgttggcgttccttgccttgttgcctcgtcactgcagtctttgcctttgtggtcacattgccttctcttctgtctatgaaatctctctttacctctcttttataaggacattcatgtttgcatttagggctcatccagataattcatgatagtctctctatcacaacatccttaaattaatcacatctgcaagattctttttccatgtaaggtacaacagcctctagggtataggacctgatatctttagggtcattattcagcctaatacagagagtgatttaaaaaaaaaaaaaatgcaaccaggtgcggtggctcacgcctgtaatcccaacactttcggaggccaaggtgtgcagatcaactgaggtcaggagttcaagaccagcctggccaacatggtgaaaccatgtctctactaataatacaaaaaacttagccaggcatggtggcatacgcctgtaatcccagatactggggaggctgaggcaggagaatcacttgaactggggaggcagaggttgcaatgaaccaagattgtgccattgcactccagcctgggcaacaagagaaaaactcggtctcaaaaaaaaaaaaaaaaatgctgaggggcataaaataaaaacaccactgtatttattactcagtttttgcattgctataaaaaatacctgaaactgggtaatttataaagaaaagaggtttaagtggttcacagttccaccagctgtataggaagcatggcttgggaggcctcaggaaacttacagtcatggcagaaggcagaggggaagcagtcatgtcctacatggccagagaaggaggaagagagagaagggagatgtgctacatacacacttttaaacaaccaaatctcatgataagtaactcactgtcacaagaacagcaaggggaaagtccttccccatgatccaatcagcccaccaggccccctcctccaacactgaagatcataattgaacatgagatttgggtagggacacagagccaaaccatatcacccacataaagaagacaaattggaaaaattacacaagtaatgtggactgtttatacactctgctgtttattataggatattaataaaaattgggacctaagtgttttaacaataggggattatttcttaaaattatggtaaatccatgatgatgctctattcagctaataagaagtcattagatattgttaacagatcaaaatcatattatatggttccagttttataaaaatgcatatatatgtatagttatgtccatagaaaaatattggaaagatatacctttaaaatgttcattccaggagataaaattatttttaaaattatttttctcctttggactgctgtgttcttaatattttatttactaatatttgtttctcttatatttagaaaaataatctattctacacttagagcaggtttgttagaaaaaaatggcatttgagacatactcttttttttttagacaaattctcactgtgttacccagactagagtgcagtggcctgatcatgcctcactgcagcttcaacctctcaggcccaagtgatcctctcacttctgcctcccaagtagctgagaccacaggcgtgtgccaccacacccaactaattttttaactttttgtagagatagagtctagctttgttgcccaggctggtctcaaactcccgggctcaagcagtcctccagcctcagtatcccaaggtgctgggattataggcatgagccaccatgccctgcctaatagctaaatttttgatcaatagagacaggggaaggaaccaaggtgtttaaaggcagcaaagtacatggtgacacgtaatctcagggatacagtgaggtttgaaatgttatgtgagtcccactggggtctcgaatgttagttgggctttgttatactactgtataaaacctggctaatttatanaataaatcttaatcatatatttatttgtataagtgctttagaatataatagatcagcatggtttttcagtgcaattgtgtgaacattcttaatactcagcaattttataatggtgtagccagtttgaataatctaatttacatacatacttatatcatttgtataatttaatttttatcatttgatgaattttttatcttttctttcaattacagtgacttacagggaataaaaacaaatgctaaaaaggatggaagtgactggattctcaatggaagcaaggtgtgtaaaaaaggacttctatagcccttcttttcagagtcatgccatgggtaacaatgtctcaaagacaactcattaattctattaaatctagggactcaggcaggaattgaatttatctaagttgttttggagacagtaaatttacaacatatattacttaagatctgtggtagcttcttctatatttcattttgcatgccccctcactaatatggcaaaggttgttttagcttccaaacagcccttattaaaccagaaaaagacaaggtgaggctcacattgcccaaatgtgggacaaatattaataatacttaaactttatgttgataaaagattgggggaaaagctttctcatatagatcaagaagaatttcaaaagattctaggagaaggccaggcacagtggctcacacctgtaatcgcagcactttgggaggctgaagcaagagattgcttgagcccagaagtttgagaccaacctaggcaacaaagtgagaccctgtctctataaaagtaaaaactaaaaaaattagctgggcatggtggtgtgccctttggtcccagctactcactcaggaggctgaagagggagaatcacttgagccaaggaggttgagacagagtaagaccccctctcaaagaaaaaaaaaaaagatcctaggagaaaaagatatcagtgatacagtgatagaatttgagagccatttgagaaccattcagttctactaaattaatcaactcactggtagaattggagagcgcttccaattaaggttacaaatgggctcaggatctctgatatcaatgagggcaaatgcatttgatatcactgagggcaagtgatattgcccacctgaaatggtatctggtatatactcagtaaatatttgttgttgactgagtgttacgtgaaggaaagatgttcattttatttactgttctaaaacaatctttctgaaaatatgtgccaaggtctgttgaagaattagtttttataagtttgggctattatctctgtatttacaaaattgaatcactggtgttcttcaaatatactttaataaatatttgtttaaataatttctcctaagaattataattaaacggatgatagctccaacatataatcagttaactcctcacatatagaaggcttgttttgaaaggggagtgggatatttggtcagaagtgaaatgggaaccacattctcttatgcctctagctctctaagcagacctcgtctgctcagccatagggttttgtgggaaccacacaggaaaagtaccactgactctgtttcaaaaactctattagaaatagcaaaaaactgaaagcaagtaaaagtaaaggaatgggtaagcaaatacrgtgcatctgaacgaatgtgcagccattaacactagcaacacaaagtttttaacagtacaggaaataattatacattaagtgaaaaaacaggatatagaatgcaagtataggaacatttttactatattaaaatttaaaaatatgagaaaggaaattatcaatgatagttgtattatgtacttatggagaattatattttcctttttcttthgaactttacattctctatacaatatctgcaatgattttctgttattttataagcatttaatatcctcctaccacccaaaaatgttggccctcattagggataatttcagccctattcaaactttggagtgtcataattaggaaacaaactgagaaagtccacttgcaaggaaaattctcatataactctattagaaagggggatccaccatggtgtttaaactcactttaggtcgcactgttgtagaaatggttcagattttattaatcctttgctataattacttccaataagaacttctggagaactccacttgatttaccaaattgagctcagcatattaaaatgaatagtttttgcccaatgaatttctcctcccttcctttctattccattgtttatttattatctgtagttaaaacatgtatgagaccatttgagagcatactgtagatactaattcctggatgctgtgtgatgcaaaacaaacaaaaaagcactcatagcatttcaactgtggcagctatacagacattaggaactagacagaaaggtaggagcttggtagacttataaggtttttgagcaagggagtcgtgtaatggagcaatactgttgaaaaaatatttttgccaagttgtatagaatttttttgaggaacatctttttcaaaatatatttttaaaacatcctttggcctcctctgtgccaaaaagaattctaagcacttaagatagatatatgaataggaaatggctatgagctcctagtaaggaggcacgttgatgatcttttattattgtgtcacctataaccatactgccaccactatattcatttgctgttgtgtagacaacactaacattatttgcccatttttcattatttgtatgtatcagtgctgtgcattttaggtgatgggagtaaccaacatcattttatacccctactatttcaaagagagagagataaaaacagatcattttggtaaatttgaggtgttgtaggaccgcttaacccagcctggagaatttgagaccttttggccaatctgatgtctaaaccacccaggatgagtacaattcattgcagcagagttgggaaagggcctttcccaagtagcagaaacaagattttcaaagactcataggtcaggaagacctcgcaacgtgatggacagcaagtagtttagtagagctgactgaagaagaggaaattggggaaagtgggacaagcaataagccaggtaaggagaggtaagctagtgccagtttgtgataagttttctatttcctgctaaaggttttgaatttatcctgaagcctattaggagctattcaaaaatttttaagtgtgaaggtgatatgatcagattgcatttagaaaaatctctttgacatcatgatgaatgatacagctgtagagagatcagttgtaggaacttaagaaatgatgagggctggaaataaggtaattacaatagacttgaaaggaagtgaataaattccaaaagtattaagatgggttagaaaaaactagatgctgaattgaatatgaagcaggatgataatgtaatttattgaagcattcattgagatagggaaataggttgataatcaggattggataggagtaggggtgggaaggaatatgtcctgcccatgagtcatcaggtggaactatccagaagcaagtacttattcaggtccaggtcctatcaagaaatgtggcttaccaggagtttgaggctgcaaagagctatggtcacaccactgcactccagcctgggtgagagagaccctgtctctaaaaaaaagaaaagaaacatggcttaaataaagatttggagacatcagcatgtagagggtgactcaagccgtgaaaatgattgagatgaaccaggaaagatgcagaatgagaagataattattaatatttgctctgagtatactgttttctgtatcaatatcatctgataatccctctcatttggcttgtcatttttccctccttaatcatagtttcctatttagaccattttaaaggaagcaggatatcaattacaaaaatcaaaaatagtccttttcaaaaactgataaatctgagaataaataatatagtgccatttacagcagattttctttctttttatttttcttttattttcttttctttttttctagagacagggtctcactctgtcacccaggttggggtgcagtggtacaatcataactcactgtaacctcaaactcctggactcaagcgatcctcctgcctcagcttcctgagtagcttggactatatataggtgcacactaccacatcagctaatttttaatttttttgtctctactattttggcaaggctggtcttgaactcctgagctcaaatgatcctcttgcctcggcctcccaaagtgctggggttacaggtgtgagccaccgggcccggccagattttcttttcttatcagtggcttccttctaaaatacaatttatcatcataatagacaatttggtttcatttttaaagaacataataatctctgtttattattattatgtataatattaatagtgaaaagaaaatctataggtttcattctttgaagcattaagtaatttttcccctgatccttgataacatcatgtgtgaataatcaactttgcagatatttgggtagggtacagagagaggtatcaagcatgtcttgtctgttttagttttctgtaatatactttctcccaatcataacttgcacatagaattgaattatcatggtgcattaataatgtacttggggttttgcaggtgttcatcagtaatgggtcattaagtgatgttgtgattgtagttgcggtcacaaatcatgaagctccctcccctgcccatggtattagcctttttctggtggaaaatggaatgaaaggatttatcaagggacgaaagctacataaaatgggattaaaagcccaggtgagtgataatgtaaatcatattcagatactaattgagtttactgttaatcagataggagacttacatagaggattacatgtggcacaattttatttcctatgctgaattcctaaaatatgcttttctgatgtggtaatgagatttattctcatttataccactctatctttctgatggtcagcaatagaaatgaatcaaggtattttgaatatctgttttagaaatggcaaaattaactgcatggtaacaagccatctatttgtaaaatgcattaaagaaaaatatgaaataaaaataaagtgtggccaggcacagtggctcacacctgtaatcccagcactttgggaggctgaggccagcggatcacctgaggtcaggagttcaagaccagcctggtcaatatggtgaaaccccatctctactaataataaaaaattagctgggtgtggtggcaggcacctgtagtctcagctactcgggaggctgaggcaggagaatcacttgaacccaggaggcagaggttgcagtgagccaagatcacgccactgcactccagcctgggcaacagaatgagactctgtctcaaaaaaaataaaacaaacaaacaaaaaaaacccagaaaatgttctttctatacattaccaaaaatgcatgttttgcttaatatgtattagaaatccttagttccaagtaccttgagaactggacagtattagagctggaatgatagtgtattgcagtaggaaagccacaaggtttagaatcagatggctgtgggttcaaatccctggtttaccacttactagttatgttcattaactactccaacttggcttccaatttgtgttttgtttttttggaaaaaataatattcacttcaatattcactgggttattggaagatttaaatgagaycattctctacattttttgtatggtctcttaggataccgcagaactattctttgaagatatacggttgccagctagtgccctacttggagaagagaataaaggcttctattacatcatgaaagagcttccacaggtcagaagtgtttaaagattccatcttttgactgaataatgaattggaatagaataatatagaaacatgttatttctatattatgcattcaaatttatacatgcaaaacttgtgaaatagctaatcatttgagtattaaagttgtaataaaagtatgagttttatagggtagttaagtaaataactgaactcagtaatatccaatcaaagcttataaagtaagtaggaaaaacagatatttcagttctgtgattccttcttagaatgattttagcttcttaactacaattcaaraacttttagctctttgtaaggaaatgtcttgcaaaacatttgatagtttgccagtttttaaataataactgtgaatcaaagggaaaagtataaaattcagactgaaaagttttagccacatagggtcagtccctaaacagctatggttttaaagtatggttgacaagtgattattgagcctcagatgccagtgtaagggggtactcctgcctagtgactgccatgaaaaacaccagcatgatggaatcaaactgactaaggctacttttacattaataggtagaatttaacttatgtgctttaagatgtttatttccacagatatattgagtcatacagtgtgcagagattaataaattgaaataagcaactggggattgtttttaactcacatgtgagtaaagagaagaaaaattaaattgcatatatataatgaagacagtcattcatgggcatggtgttatgtgactgttgtcccagctactcggaaggctgaggtgggaggatcacttgagccctggaattccaggatgtaatgaactatgattgtgcaactgtactccatttttggcaacagagtgagactttgtctcttaaaaatttaaaaagattataaaaaaataaaggtagtcattcataaaaataaaggatttgctttagaaagtgattagagatatgtcaaaagaatctcataaatctgttttcttataaggagttaagatataaattaatctttatgagtttattataaagataatttataggatttatcgtaattgaaattgtgtgaaaatcacttgcataattagagtaatgtttaagacctaatttttgtgttataggaaaggctgttaattgctgatgtggcaatttcagctastgaattcatgtttgaagaaaccaggaactatgttaaacaaagaaaagcttttggcaaaacagttgctcacctacaggtaagcttgtcactgtggtttagtattagatggtatcagtttactaatctgaaatggcctggggtaaatagaagtttggagttattttcatgtaaggtgatattagaaaccatggaagtggatyagatcactaaggagagatagtagagagtaagacaggagtggtcttaggacacagtccttgaggaagactacaagatttaaaggtagaattcatatttggaattcatattgtctgaaaaggaggagcctgtaagatgactgagaatgaataaacagaaaggagaaagcaaatcaggagagctttgtcacagaagctggaaggaaagagggcttcatggagtagggagtgggatcaattgctgcttaggggaaaaataagacgaagggcaaagagtgttcattgaatacaatgatatggagattatttagtaagagccattaatggaggyggagggtgacacacccgatgagtagatagaaatgaggacgtaaaacaatactgatggtaggcaactctttcctgagtttggctgtgaatggtagttgararaaagggtggtaagsgaagaggggaggggaaggagatttgagattcaagggagatatttgggagttattaattttttgtcgttatttttaggatgggaatgygggtgcatattttaatacctgtatataaagaaaggatttaataaagagggaaaggttgtagataggaaggaaataatcaactgcgtaaggtctttgagaaaggstgagtttgtggatgctgacacatggaaagataggccttcccatcaacaggagagggattccttcatttgcacaggaagaaaggagcaaaggacatctatgagttcagacagatacatcactctgttggtagaaaactacaaaagttctttatagaagacttctatttctttaaataacgtggccaggcacactgactcacgcctgtaatctcagcactttgggaagttgaggcaggcagatcacttgaggtcaggagttcgagactagcgtggccaacatggtgaaaccctgtctctactaaaaatacaaaaattagccaggcatggtggtgcacacctctaatcccagctactcgggaggctgaggcaggagaatcacttgaacccaggaggtagaggttgcagtgagccaagatcgcaccactgcactccatccagcctgggctacagaacaagactccatctcaaaaataaacaaataaataaataaataacaatagagaaagtccttgaaagacaggtgagtgaaggaggcatggaggtgttgcagaagggtgaggsaggtatgaaatatcttcttcagaatgagaaactaaactactttctgctttttgtgtatcaatcagctttatgataagagtttagcttcccaggtacaaacatagagaaaagacagatgattgtgtttacctaggattgagttttcccaggaacttgagggtttttgcaaaagaactcagtatatagtggccgcagtcactaaatatgctaattaaattttagaccctatagtttctttttaaatgaaggaatagtttataattccttcatgtggtcatcaaattggcaaaacatctcaccagcaaaaaacctggagttgggatttgacttaaaaatttttaagtagaatgactggctgaaaggctttgtgaagggaaaggtagaaatgaaacaacttggtggcttttcagaaccagcattctagaaattatgttcaagtgtggtttatgtcctaacacagctacttgaatctccgtagtctagtcgtgttctctctctcaaaaatagtttcctatttgtaaatatataaaatgtatttgatttgcaaaattgtaaaattttgactataaatctttaaaatttataacgtttgtaaatatttataaaatattttcctacttgtgaatatcagagactgcctcatagcgttgttgtgaggattatgttgtagaaaaaactgggttcttgtcacaggaccaggataatttgggcacgcagacacattgtagattgagtagggcagggtttattaaatgaaaaggagaaaggaactctcagcaaagtgaaagaaagtcctgcgagcagttctcctgcctcacagattgaatcctaggtcatcacacaggaacaggagaggctaggctcctctcctctgcaaacagtgtgaacttcccgaggctccaccccgtcctcccagtgcacaggtgggcattattcagaaaggatcagttgggaaagggcaggcttcatctgggaccagcagtcgggtttttcagcctttaggctgtttaggcttgaaggcagggtttcaccagagaccctcggctgtctcctgtctctatcaattagatggggtaatatacataaagcgcttggaatattgcctggcaaagtaagcccacattaaaattagctgttatccttattttattccttacataatgccttgctccattttgtttcaatatgggagamctttttaccatctacttcctcttgctcttgatctagaccctctctttgtcgttttgggaactgtttgctaccggtattgtcatcaaattaactttttccatcctgaaaaaaagtctttacatcctaacttttcttattgacataacaaacctaaaacagttgttctgaatctctaaaaatgaggtacactcaatcaagaaaacatttaacaaaacagtatgacttgacttgattaaattctgatttccttaagagcaaggatgttatactttatattccctttcatttatggatcactgatttacacgtatcagaggttctcagtgaatgccctttcactcaggtgtttagaaatgtcaggaatgaggtggaggtgggtgtgcacagttgactggaggtataacttgtatagtgccctggaggacagtgttgttaaatgtcctgtaattcacatttggattacaactaattgtgtcactcaaaatatcaataatttcccattgagaaaaactgacatatatgattttttcctttttggttcactgaacaaatatatattgattgcctcctaagggtaatgtgttcaactgtaatttgatgggtgtaactctagaaacacatactacgctcctggcaatatgaaggaagtgttaccacttgawatcactctgattttctcaactgtacccaaagtggaatgagtatcatttgcttctgaaatccaaccaccaccacttaaacatcaaaaatgtttactaaaacacttataccaaggccaggcatagtggctcacacctgtaatcccagcacgttgggaggcctaggcaggcagattgcttgagcccaggactttgasaccaacctggacaacgtggcaaaacctcatctctacaaaaaatacaaaaattagccaggtgtggtggtgtgtgtctgtagtctcagctactcaagaggctaaggtgggaggatcgcttgagccctggaggcagatgttgcagtgagctgagatctcactattgtactctagcctgagtgacatagcaagaccctgtctccctgctccccacaaaaatgaatacaaaaacaaaaatatacctttagccttattttggctaaaggtataacagttgaaccaaaagacatgtttccattcctttggaaatctacatttcctgtgtttatgaacttaatactagattacaacaaggatgactatattattacccagattgcctgaatggctcagaaggcatgtaatttgacatttaaccatgaaggaaataggaaagtggtccatattgttttctcataggggaaaaatattcttttaaaatatatatttattgtattttaatagcaaaaaataaataactttaatcattcctttttaaagaagtatcattttattgttgccttctttcaaagttagttccctaaactttcagtaggtggcagtagcattctacttccacaggtcacattattgatagctagtagtattgttttccaagtaagtttatatgttctgagatttctgagatatgtcttctgatcttcctattttatctaaataaatatatttgaataatattttcatatttcaagctaggagtatattcagagatgatgaataaccgatactgtacatacctataccttgtattcaagagctgggtacactatggatctagttattcaattgaaatagaagagctttaaatgttacaatatacttggccacatgtcattttataactatataactattcagtttccattctctttgttatccttgaattttggacattttggggctttctgaccagttgaaatgcatgtcacaaaatttattttctttttagaatagaaacctacgtatggatgtagcaataattattaggatttttaaaatctatgctctccatagtttatgtcgatcttatggttttttgcggaatagacaataaaacagtaaaatccagatgttaaataataatggatattattgcttgactgctccctatctgccagacactgctaagtgaatggtctcattctttttcttcacaaatctatataagtattttaattatttttattttacagttaaggaaattaaggtatagagaggttaagtaacttgccccaaattacacatatattctaattccagaacctacactctttacstatatactgttattactgcccagaagtgcaaagcagatgggccttttttcttttcctatttccttcactcagtgggcaacgaagtgaaaatggaatgttttttctaatctaatgagagctcttggttagtcatttcctgtgtggtatgtgttcttaattctaagggcataaagaattagggagaggaatagagaggaaaaaaataatacttcttcttgacatgtgtctaaaatgggaatatccagtttttaagaccttgagcatgggactaattaactatcaaatagcaaacctagtgtgtttcattttatattttaaccataatatgtgagagcaactgatgctgttgtttaaatgaatactgggctagataacctctccaaggtgttctccatttccataattctaagaattctgtcattcagaactctgaaaaagactccatccagcccacttagtaacttcagaataatttttaatgctagctgcagtattatttattaacaaatataaatgacttaaaaatactgctatgaccttgtcgatcattcactaagagcacttgactagtaatgtgtggtctaatttttagttgcctttgattagaggatgatttcagaaagcataatgcagtgtctgcagtgaaaagcaaagaccaaatctgtttagtaacgctcaacccaatggcaagaatatgtaaatatttaatctttttatcctcagagagtaaattatgtactcttggagacattattctctcagacctctggacttcactgaatgcactgatgcaagaattctaaatcattccattctggtttgaagttttacttcagcttctagaagtttccagcatttacaaaggaatgactcttgtatgagagaatcaggcttagatatctttactctttcatattgtaaagacagtgcataaattcccaaatgtggcatcatgtaggcaaaaaaatatcttgagacttgttggatccacccttattttccaaatraagtgtcatacatagtgtcattgaactaaactaggagtaggcttagaaaccatcttcagggattttcatggaatactcatctgttttcgatatatagattatttgcctatttttttctttttttgttccatctttatattgtctaagagtaaacttcaatgtgtgggttgggagtgggaaactttgtgctgattaaagggtagatatttgacctaaktaaatatatgatgaatagaaatggagatagaaaaaattaagggaaacaataagcggggaagaaagttttgatgtgacccagcatgttcagaactagaggccagaatacagagatggaaggagtggggtgccaaccttctcattgcttagttttggaatcattcgatgccagttacattctctgtttctagaacagggtgaaataaaaccaggggaaagacagtcagttggagttttcatcagcacagtagttatgttgatatacctgtaaggaatctgcccctcagagctttactccacctgatacaccctggtcttgcttggtcctgggtctttttacactcccattctactcttttccagaaatggtaagtatcaaaactgtcccaaccaacaatgacagtgaaagaatcagttttataacttgagaattgctgtagccagcattaaaagcagaccatgtatcttctgagaatgtgtcccaccaccctcctttgagaacacagctgtggctttggacttggtagtacctaggtgggatgtgtttaatttctagtttgagtttcactgcaccacctttgcctgtaactttccatgtatatgctattagccacagtgaagttcttactcatttcacagcagaatgatcagaactgtttctatctgaattttcacaaagaagataggccagctgaccatatctgggccttggacctaagaaatcaactagaatggagtatacttttggagctacccaaagtgggaacccagtatttcaagttcaagccaatttcctgagggaggctcaagagtcagtgccaaagagaacagatatacactccaagttcagagtgtgagagcctagagtcaggaatgaaataaagcttgattgaagcaaggacagtcagcaacaattgagaatggtctaaatagaatgatttccaaaaatgctaatgggttgtccatggccagtaggaggaggtaggtacatagctatattaacattgataatcccagaccattcagtccaagctagagactgctaaacaagctattgagaggtacgggaggtgtattcatccattttcatactgctatgaagaaatacctgagactgggtaatttattaaaaaaaaaaaagaggtttaatggactcacagttccacatggctggggaggcctcataatcatggcggaaggtgaaggaggaacaacagcacatcttacatggtagcaggcaaaacagcgtgtgcaggggaaccactctttataaaaccatcagatctcatgagacttactcactatcacaagaacatcatgggacaaacccacccccatgattcaattatctcccaccacgtccctcccacaacatgtggggattatgggagctacaattcaagataagatttgggtagggacagagccaaaccatatcagaagggataatgtgaagggatgaaagaggatgagggtactggattttgatctctttagtactctgattttattctattgctttctacagatctagattaaatactgtgcaatattaaataataccttatattttgatgtttatgaacatatatagaaaccccttgtccctccagatgttagaagcagagtagcaaaatctgtatacttaatttcattaataaagaaaaaaatcttcaaggatttaatctctggaggaaaaagcaacaggtgttttcaacggctgtacctaaataactgtaccacaagatggtgctcacacattaaagtcatgctgtttttcaagaattttgcctcgtctaaattttacaatctgaaacaagacattgtttatgttttaaactatttttgcatcttttagtacaaatttccttagcactgaaatatagtgagttttaaatttaagctgatttggtaacaaatgccatttttatggaggaaaaaaccaacaattccacttttgtttgccctaaagatcttttattgtataatttctgatatgttaagtgggttgaagtttatatttctaccatgctcacttttttcttttatttcctttaaattcaagacagtgcaacatmaattagcagaattaaaaacacatatatgtgtaacccgagcatttgtggacaactgtctccagctgcatgaagcgaaacgtttggactccgccactgcttgcatggcgaaatattggtatgcatgctacagtaattagagtgcggtgtgtgctcagactgatatggaattctgccaattttaagctcagccttgagggtcttaaaggaagaaatctgtgaaatgaaaaataaaagtgagactccactttaaaaaaaaaatgctaaaaagttccattaagcatatgtataatgtgctaaaaatgtttcaagttggtatttaatttttttatcctaataggcaagcaaagttagtatttaattcttaacttgctattgaaaataaaatattaagagtgggaaaatgaagagtgatattgataggatgactgattcattcattcaagtaatagtttaatttcaaattatctgaagagtggcagtatagtgaggctgaaagggaacagtaaaacttaggagtcttgagatagagtccraattcttttattaaataastataattaaacttaattccatccaggaaaatgtttttgttatctgtgaaatgactaagttggacaggatttttctatttaaggtgctttccaattttaagaaaaaattcaggaagaactggctgtccaatcaaagtttcacaggctctattaagtgaaaggagaataaaaatcctattaagtttagaaagacttcgatttgaattaaagattattagcaatggtgttaaagatgagttgaatgaaaaaacatccctgtatgtcagacttttgtatattttaagattttagaatatacagtctaaatcagattctggaagtagatttggtttcctctttttaaaaacaaacattctcccatatcattagcccaagagtaacttagaataaattcctgtcattattcattaacttgtgttcagttcaatcacaggtagaacaggggaaatattttgtgctttatataatgatcccataataacaaaattgccaggttgaaaaataatgtggaattacttttcagaaacttgcacttttgaggagactttttatatttacatttacaagaagttctttgactagtggcaaaaagtgtaaaaaaaatttacatatttttggaaaaagagaagtttggatagccattgaccttgttatttgaaaacctcaggtttatacacatgctcatatttcacactgaaacacaggaggcaactagttatagcccagtaaatatttcactaaaatacttgccaaatataaaaaattagagaaatccaaatattattgtccccaaagtcttgtctattaataattatattgttaatatattgcttagaaatatcctcacctgtcgtatggtctgagttttaaattattttaaataaaaagaagtatctacccttatttttgctttatgcttcccactattgaaaaataagtagtggggtgctgtagcttgccactgtagtaactcctacttgagaagctgaggtgagaggatcctttgagccctggagttcaagactgtaatgagctatgattgtgccactgtatcccaacctaggccctagagtgggtgagactccatcactaaaacagactcacaaacaaaaagaaagaaagaaaagaaaaataagtagaaaagaattttgaactaatgtatttttatgttaaggtgaataaaatctctatcatgaattttaatgatagaattgtgatattatcagaaaagaatttttctcaagcactgcatgtttatgtatacaaacattatatataatactaatacatacacttcaggaataataatctctatataattttctaatgtttcctatatgatagcatatactttgttagtctgccctcttaggttttcacttttatcttcaatttatttctgaaaagtcagaaccctaaaaaattgcttttttatactgaaattcagaatcgtgatcttcaagtagaaagtgacatcattggagaaaaaatgcatattacaagggcaaaaagaactaggtggctgagtaatttagatcatatagagaatccaaataaattagaacatattcaagtctttactgcatgtttttctagcctcaaatagccaaaatctaatcatctgagttttctaccttttgtttctagcctaacaaaaacctagcaagaaatataattaatgaaaaaggtactcttatatgaaaattctcttgaaatatatttcatatgtaatttttatcttctttgcttagctaatatgccgttctaattgcttaataaatgtgcacatttaaacaattgtaaataattagttttctggttttgaagcacctcatgaaaatccatttcaaacatttcttttctgccttttattttggtcatttagggcatctgagttacaaaatagtgtagcttacgactgtgtacagctccatggaggttggggatacatgtgggagtacccaattgcaaagtaagtatagttttctgatacactcttctttatgatgtgaagaaaaaggaaaatttctttactttgtacatcaaatgtagagggaaaggaggtgtgcaatcttttgaatttttcagctgaatacagacaaaatgtattcaagcaaatggaaacagctttttttttatcaactccctactaggattttatttttcttaaataaagtaaagagaccaataaacaaaagcttgatccttggctttatttgaatccttatgtagaaggacaaatagtattttcaaaaattttttaatttttttattttttattttattttgagacagtctcgctctgtcacccaggttggagtacagtggcatgatctgggttcactgcaacctccaccttccaggttcaaataattcttgtgcctcagtctccagagtagstggaattaacaggtgcgtgccatgacacctggctaatttttttgtatttttagtagaggtgtggttttgccatgttggccaggctggtctcaaacccctggcctcaagtgatctgcctgccttggcatcccaaagtactgggattacaggcgtgagccactgcatccggccaaatactactttttttttaaaaccaaaaaaaaaaaaaagcaatacagaaaaattaactggcatatgaaaaggatctaagttgtcacatatcttaaatatctgattatttgttttgttctaaaaaaattaaaaatcttctttctaaatagatttatttccttcaaattgaaagaaatcaaatatatctttttatcatatatgaatattcttatcagtttgaagcagtactaatttgtaaataggcagtgtccccattcatatttcttcctcaatctccagaatttccttttctcctaacagtcttttgcctcagaagtctccccatagctttttttcctcatcaccctagaaaatatatttttctgattatttagcaatgattttggtttagaaaattttcccaaggaaattttttatttatacagaaaagttcagtttgttctgaatctgagagtaagaatgctataggcttctaaaaatgttttaagattatcttaatataaagtatctaaagggaaaaattatgaaacctacattcaaactggcagcctaatgatttcaaatttatctttttggtaagtataattggaaacatttaatatgcttatagtccttagaaaaaatattttactaaaattacattaagaacagaagctatgtagtggctcaatgtttgtgtggtttagttcacatttaagaaaggcctattaggtggggagaaggcaatcatctaaatggcttaagattagagcgtggcataagccttggtctctgttttctcggagtcaactccttcaagttggtaccaagcaaacaatgtagattgatggcttatttgaaatctctggtttcagtttgagagacttatattctctttaagaaacaataatcacctttcttggccagtttgttagttcaaagattgtatcaatttttaaactagactgctatttctcttcccatatatcgcctaatatcaaaaaagccactgaggccacgtgcggtggctcactcctgtaatcccagcactttgggatgccaaagcgggtggatcacctgaggtcaagagttcaagaccagcctgggcaaaatggcgaaacaccatttctactaaaaatacaaaaaaattagctaggcgtggttgcaggtgcctgtagtcccagctactccagaggcatgagaatcgctctaacccgagaggcggaggttgcagtgagtcgagattgcgccactgcactccagcctgggcgacagagtgagactgtctcaaaaaaaaaaaaacaaacaacaacaacaacaacaaaaaagccacatagacacattggcaatatgtggatgtaatgtatagattttgatttgataaaaaaagaaaaatcttctaattgtgtttcttatatcccccagactaaactacattagtttatatatatgttgctgagggttggtttcatagataagaggtgttttctctgcttttttattttgtttttttgtttttgtcttctttaataactggtcttcagcatgtgggtttatttaataagtcttactcattaggctcgagcccgtgaggagtgagatttaagccttgtcattttaagatttctctgccatgctgggaagagctgccttagatgtagaacttcactgcagtgtggttaaacatttctgctgccgcctttcactgttaattttagttgatgactaaatttaattagtaacatataaaaggtctactaatctctgctttactccattggaacttctttaatgtaaaaagaagcctagcccatttacaaatatatatatatatatctaaacgcattgggactgctgaagtaggcttacagtaggtaagtgctcaaaatgcaggtgctagattttgtagagaatagcaaaatccgttcagaaaaaaatgtttgaaaacataaatatctcaagcttttaaagctttcagcagaaagttctgagattgtaaatttcctttgtaacaccgtaaatcatatcagtaaatatttactgagtgtccatttctttgtaaggaaccctgatgaatatggagaagaataagtccaaaagtggtatgttcctagagagctggcacatttaatttgtcttaaaaatcaaatttaaacaaaacaaaacaccaagattatacttgagaaaaaaaaaagaaaagcctttgagtgtgtctaccaggaaagtccaaagttcaataactagctctaagtgctttggccaatgaaagtgttgcaatatacaaaaaagatatttgaaaaagaggcagaatacctacatcctcattccagtctgccaatgatgtgttgttrgtgaccattaaatagcaaccattaattaggaaatatattaacttctctctactttagttcctttaccagggaaacagtattaacatttatccctccccaatcccagagctgagaggataaaatgagatgagaaaagataaaaacaactgtacagtggtacggttgttatcatgactatcaaaagtgaacttatgatatttgggttttttttttctttggtgtgggtatagcaatggactcagccacttagtattttaactccacacattgctgaagtgactattaaccatttccaaaaaacaagttacttgttaactttctgggaaataatatttgctaaagcattagtttatattcctgatagtgatagtggttgtgggaatgctagaaaatatgtatcttttttcttttgttttctataaaaccagtggatttcaactttttaggaaacattaaagataaaaagaaactaagacatcctgtgcatttcctaatctaaaacagactttttaagagtgttatcatatgtgctgaattttacaaaattaaatcagatgaaacatactcattatttttattttgaatttgtaatctctttaatcaaattaatacaaagctatacagattattaacatcttaatagttttttttactattattccaatttaggatgaatgccatattgaaaaaataagtaatttatgaaggacttttattgtttgtacttcactaattgaatagtttatgagttacctggtaagacaaaatttacagtttctaatatattttatttattcattcaatcatctgatttatccagagcttatgtggatgccagagttcagccaatctatggtggtacaaatgaaataatgaaggagctgattgcaagagagattgtctttgacaagtagacatctgcccacatcctggagtcctattacagctaatctcgttttaaatctgctcaagataaaatgtaacttggaaagcgaggaaacactaaacatgtttttacctgctctctctatagagaaggaaataaaatataaatataagattaacacagtggaaggacaaatctttgaagccaaaattctagttttccaatataaggtttaacttacagttttttatgtagccaaaggtaaacggttttctgaatcttgcctaggtgtttcatttatctctaaaattctaaaaagcataaatcattcaaatcttcaaaccaaggcagaaataattttatgtcgctmtagtataaaaacattaataagatagcacattgacttttaaagggaaaagtaaatataacttagcatgtaaactcatttcggctaccatttgctccaaattccctagaacagtggtttttaccactgtactccaaccccgtttttaagcaatggaactctttcttcaaacaaaagcttatgcagaacatctctgtgaaacgctgctgagtgagaactgctttcattgaagctggaagccatcataccttactgccttgaaacccctaggactcagctaagtatttgcctaaccctgaccagggaatgccttggttctgtcaattgctgacatctgagaacacagaataatccatcatttttaatttcaagatattggtacattttataggtatcaaagcaatggcttttcttttgcaacagttaatgtatttattaacttaataattactttatgtcttctataaaccaggctgttaatacaatgatgacaaacaaaactggcaagatcactaaaaaataagtgaataaacaaataagtagtaaaataaggtaagaagtaaatatgtaaaagagataatttcaagcataagtgcaatgtaaataataaagtaagcatttaaaattcaaaagtgaggaaatgacatttgatttaagacttaaaagtaattacaaaaaataaaccattaatttaaagtagctttaacatggaaacagatgtattcttactcaacttagaacacaaacattttatttggtattgttgatattaaacattgttttttaatacaaccattacaactggagagaggagagggaagaaaaaatattttgataccagtctttttaaaattttttttattgtactttattttttaagatggagtctcgctctgtcattcaaggagtgcaatggcgtgatctctgctcacagcaacctccgcctcccaggttcaagcaattctcctgtctcagcctcctgagtagctgggattacaggcacgcaccaccacacctggctaatttttgtatttttagtagagatggggtttcgccatgttggtcaggctggtctcgaactcttggcctcgtgttctgcccacctcggcctcccaaagtgctgtgattacaggtgtgagccactgcacccggcctttttattatactttaagctctgggatatatgtgcagaacatgcaggtttgttacataggtatacacatgccatggtggtttgctgcacccatcaacccgtcatctacattgggtattttctcctaatgctatccctcccctacccccctaccctccacaggccctggtgtgtgatgttcccttccccgtatccatgtgttctcatttttcaactctcacttatgaatgagaacatgcagtgtttggttttctgttcctgtgttagtttgctgagaatgatggtttccagcttcatccatatccccacaaagaacatgaacgcatcctttttatggctgcatagtattccatggtgtatatgtgccacattttctttatccagtctatcattaatgggcatttgtgttggttccaagtctttgctattgtgaacagtgctgcaataaacatacgtgtgcatgtgtctttatagtagagtgatttataatcctttgggtatatacccagtaatgagattgctgggtcaaatggtatttctggttctagatccttgaggaatcgccacactgtcttccacaatggttgaactaatttacacccccaccaacagtgtaaaagcgttcctatttctcaacatcttctccagcatctgttgttttctgacgttttaatgattggtattctaactggcgtgagatggtatcttattgtggtttagatttgcatttctctaatgaccagtgatgatgagctttttttcatatgtttgttggccacataaatgtcttcttttgagaagtgtctgttcatctccctcacccactttttgttggagttgttttttatcttctaaatttgtttaaattccttgtatactctggatattagcccttcatcagatggatagattgcaaaaatattctcccattctgttggttgcctgttcacgctgatgatagtttcttttgatgtgcagaagctctttagcttaattagatcccatttgtcaattttggctttgttgcagttgcttttggtgttttagtcatgaagtcttggcccatgcctatgtcctgaatggtattgcctaggttttcttctagggtttttatggtttttagatcttacatttacatctttaatccatcttgagttaatttttgtataagtcataaggaaggggtgcagtttcaattttctgcatatggctagccagttttcccaacactattaaatagggaatcatttccccattgcttgtttttgtcaggtttgtcaaagatcatatggtagtagatgtgtggggtaatttctgaggcctctgttctgttccattggtctatatatctgttttggtaccagtatcatgctgttttggttactgtagccttgtagtatagtttgaagtcaggtagcatgatgcctctagctttgctcttttagcttaagatttaattggctatattgtctcttttgtggttccatatgaaatttaaagtagttttttctaattctgtgaagaaagtcaatggtagcttaatggggatagcactgaatctataaattactttgggcattatggccattttcacgatattgattcttcctatccatgagcatggaatgtttttccatttgtttgtgtcctctctgatttccttgagcagcggtttgtagttttccttgaagaggtccttcacatcccttgtgagttggactcctaggtattttattctctttgtagcaattgtgaacgggagtttattcatgatttggctgtttgtctactattggtgtataagaatgcttgtagtttttgcacattgattttgtatcctcagactttgttgaagttacttatcagcttaaggagatttttttggctgagatgatggggttttctaaatatacaaccatgccatctgcagagaaaatctgacttcctctcttcttatttgaatacctttatttctttctcttgcctgactgcccaggccagaacttccaatactatgtggaataggagtggtgagacagggcatccttatcttgtgccagttttcaaagggagtgcttccagtttttgcccattcagtatgatattggctgtgggtttgtcataaatagctcttattattttgagatacattccatcaatacctagtttattgagagtttttaccatgaaggggtgctgatttttatcggaggccttttctgcatctattgagataatcatgtggtttttgtcattggttctgtttatgtgatggattaagtgtattcatttgtgtatgttgaaccagccttgcattccagggatgaagccaacttgatcgtggtggataagcttttcgaggtgctgctggatatgctttgccagtattttattgaggatttttgcatcgattttcatcagggatattggcctgaatgtttttgtgtgtgtgtgtgtgtgtgtgtgtgtgtgtgtgtgtgtgtgtgtctgccaggttttggtatcaggatgatgctggcctcatgaaatgagttagggaggattccctctttttttattgtttggaatagtttcagaaggaatggtaccagctcctctttgtacctgcaacagaagatggctatgaatctgtgtggtcctgggctttttttgcttggtaggctattaattcctgcctcaatttcagagcctgttattggtctgttcagggattggacctcttccttgtttagtcttgggagggtgtatttgtccaggaatttatccatttcttctagattttctagtttatttgcatagagatgtttacagtattctctggtggtagtttgtatttttgtgggatcagtggtgatatccactttatcagttttttatcatgtctatttgattcttctctcatttcttctttattagactggctatcagtctatctattttgttaatcttttcaaaaaaacagcctctggattcattgattttttgaaggctttttcatgtttctaactccttcagttctgctctgatcttagatatttcttgtcttctgctagcttttgaatttgtttgctcttgctgttctagttattttaattgtgatgttagggtgctgattttagatctttcctgctttctcctgtgggcatttagtgctattaatttccctctaaatactgctttagctgagtcccagagattctggtacattgtctctttgctctcattcatttcaaagaacatcttgatttctgccttaatttcattatttagccagtagtcattcaggagcaggtggtgttcagtttccatgtagttgtgcggttttgagtgagtttcttaatcctgagttctaatttgattgtactgtggtctgagagactgtttgttgtggtttctgttcttttgcatttgctgaggagtgctttacttccaattatgtggtcaattttagaataagtgcaatgtggtgctgagaagaatgtatattctgttgatttggggtggagagttctgtagatgtctattaggctcacttggtccagagctgagttcaaatcctgaatatcttcttaattttctgtctcattgatctaatattcacagtggggtgttaaagtctcccactattattgtgtgggagtctaattctctttgtaggcctctaagaactttctttatgaatctgggtgctcctgtattgggtgcatatatatttaggatagttagtgtttcttgttgcattgatccctgtaatgcccttctttgtcttttttgatctttgttggtttaaagtctgtttttagagagactaggattgaaacccctgcttttttttggttctccatttgcttggtagatattcttccatccctttattttgagcctatgtgtgttttgcacaagagataggtctcctgaatatagcacaccaatgggtcttgactctttatccaatttgccagtctgtgtcttttaattggggcatttagcccatttacatttaaggttaatattgttatgtctgaatttgatcctgtcattatgaggctagctggttattttacccgttagttgatgcattttcttcatagtatcagtggcctttacaatttagtacgtctttgcagtggctggtactggttgttcctttccatatttagtgcttccttcaggagctcttgtaatgcaggcctggtgatgacaaaatctctcagcatttgcttgtctgtaaaggattttatttctcctttgcttatgaagcttagtttgactggatatgaaattctgggttgaaaattcttttctttaagaatgttgaatattggcccccattctcttctggcttgtagggtttctgcagggagatctgctgttaatctgataggcttccctttgtgggtaaaccgacctttctctctggctgcccttaacattttttccttcatttcaaccttggtgattctgatgattatgtgtcttggggttgctcttcttgaggagtatctttgtggtgttctctgtattttctgaatttgaatgttgacctatcttgctaggttggggaagttctcctggataataccctgaagagtattttccaacttggttccattctccccatcactttcaggtacaccaatcaaatgtagatttggtcctttcacatagtcccatatctcttggaggctttattcattccttttcattactttttctctaatcttgtcttcatgctttatttcattaagttgatctttaatctctgatatcctttcttctgcttgattgattcggctattgatacttgtgtatgcttcactaagttctggtgctgtatttttcagctccatcaggctatttatgttcttctctaaactggttattctagttagcaatgcttctaacctttttttcaagattcttagcttccttgcattgggttagaacatgctcctttagcttggagaaatttgttattacccaccttctgaagtctagttctgtcaattcctcaaacccattctctgtccagttttgttcccttgctggcaaggagttgtgatcctttggaggagaattgacgttctggtgtttggaattttcagcctttttgtgctggtttttccttatcttcatggatttatctacctttggtctttgatgttgttgaactttgattggggtttctgtgtggacgtcctttttgttgatgttgatgctattcctttctgtttgttagttttccttctaacagacccctctgctgcaggtctcctggagtttgctggaggtccactccagaccctgtttgcctgggtatcaccatcgaaggctgcagcatagcaaagattgctgcctgttccttcctgtggaagctttgtcccagaggggcacctgccagatgctagccagagctctcctgtatgaggtgtttgtcgacccctgctggggggtgtctcccagtcaggaggcagcggggtcaggtacccacttgaggaggcggtctgtcccttagcagagcttgagcac

SEQ ID NO: 5614 - DNA, 151870 bp, Homo sapiens
  misc_feature (1)...(151870): n = A,T,C or G, or insertion/deletion polymorphism (see Tables 1-2)
agatgtttggtgttttagtaaagacagacttcaaactaagtggtgactaagcaaaccccttacataaagctttgaataggatttcataaatattccaatgaaaaacatttggagataagaaggaaaaaaagctcacacttatgaaaaaattattttcagaaaaccacttaaaattcaaattaagtcctattcatttaaatattaaaatataccataaacccaaatttaaaggaatgataatacatacatcagctttcaatggtagctgcttatttaaaatgagcatctgagggtatattccagtttcatcctcttcaaattgtgcagctcagataaatgtttattttatggaaaatatttgcaaaattacaatataaatacatgattatattaaggtaggatgactatataatttattcttatctatagatataaaatgaactcagtaaatatagcacactcttgatgaattgttagtacacagtgtttctcagtaaagtattattaagcaacagttatctagttttcaaatgtacatcttaagaagcttttaagatggaaggatmcactaaatcccccaataccctttttagttggggaaggttagtacttctgtgaattctgagatatcatatttgtgttagtgactgttcataggttccttgcatttccttaacttgaaaccttacttctttagtctgaatgttctttaaataatgccacatcagctaaccacacttttaatttgagtataatattatgtactgcatatttattcattacttaaacacatatcaacaatgaaacaatgattgaaaaaaattttgtctagacaaattccccaaattaactgtcagggcactgtggggaatctcaactaaatatagtctcaactgtaataagaatttgggttagaaatagtattttatttattctagttcttaagacatcaaatgtgaactctactttaaaattctttgttaaatatactgggatttgtttcaaaagcatcttctacccttctccattacactgatttaatggaaacctgttacaacaacagttccaacacaaacatatgcatgcacgggatcaccttatagattctagctacatagttattgaaacacatcccacctgtcaagtggcataaatgtacatcttctatatacaaaaggtaaagtgcattattaaattagtgaactgacagattgtctgcctggaccatacagctttcaaatagacaaatgtgaaattctcatattagaaccaattatttcaagaggttccaactagcttttccaccctgtcatttatttttttggccatgctctttagtgcaaataagcttgtgtttgactcaagtttcagggacatggcagtctggggctttaacaaggaaaattataaaatgtagaggaactttaatatctttataatacattgcatcttttgcataaagcaacagattagtgctgctttcgattgctaggagcacactgccaactatcaagaggaacccgtttccaaatttcatactattagcttatattactacagtttgagcctgtaccacattatgcttggattattaggtgcaaacatcatcagtgttttagaattatacagtgaactagtacttttggttactaactttcatgctcattttttaacttctaacttccagttgccttaagagtttaatgtcttcaaggcagggattctgttattttgaaggataccatgaacacttgcagctccatgtatgttacaaatgacaataaataaaatgcatattgcacagataagaatagtagcttattttataagatacatggcaatacatgtcctaagaccagagttttgaactggatcatatttaattacggctaatgaattcttgggaattttaagtatcaaaaagtcatagcatcatctcatttttgaatgattaactatgaaaaaaatgaaacaaaaggactggcagaaggcttaataattttagagtatactcaattgccagtatatatgcatctatttaatctgcagctttgagatggtaaaaactttgaagtatacatacaaagtagaaaatctggctgcttaactaattctttacttaaataattaatggaaaactaaatttaataatgtttatatacaatgagttaaagatatttatctttaagtctgacatggtattgtatgtatgtatacacacatatatatgtatacatgtatatacatatgtctgtgtgtatatatatagatatagacacatacccaaatcttatcagacccaaaaggtaaaaggaaatcatttagacctaatggatataaatattttagaaaggaagactttaagagagtgtatacactcatagcaatagcgataggaacaatcaaatactagaatattcacagctccagtttgccaaaatctgacaggttgattattattaataggcactatgatgggcagcaataacaatcagtagtacagtaattcaagtgcacatcattccttcatagaccaaaaactacttttttagcaagcctacatagttattttacagttaggactgtttaaaaatccttgctacttttagagtctcaacacccaccatgtgctattagctctagtactaacattatctcctaaccttcagttgttccatagtgatccagatggtccacaattataatgaactaatgagattccttcacgctactagaggaaatgtgaaatacaatctgcaaaccaacactagtatatatgtcggggttactgattgcttgttcttaagtaacataaaccaatgaaattaatttttttaattcataccatcaagttttcttagtgacctcacgtaaaggtattgggggacaaaactctggaagaaaaaaatcgctgatataattttaaattacttttagcatataaaagaagagctacattctgatttgaatccatgcagccagctctcatcaatgagagtgatatttgggggttgaaatcagtgttctggctcttaaatatgattagatggacttattgtgtgggaggtgaataaagccaagataaaagacaataatttcattcagaagaaaatatagctgaatagatgtaatttcagtcaattaatacaggatgggttggtacacatataacactatatccacttgtttaaaaaattgcttaggtgttgaaaaattgctgtggcacttcctggaaagtaatttttaatacaggtaaatgggtgagtcttgtgtaaagtcagaaagagcaccttggaaaatgcctgaattttcctttcaaatatatttataaccaatcttcaaataatatttttctcagactggaaatttgtattctaaattatttttagaaaaaaaaaatccccaccccctccagaattaaaacacctgtaaaatwcaggattatattggaagtgttgacatggttttaagggtagcaattgcaaaagtgctactaaaatatattattacaggtatatttttatatcagttaattggtacaccaacccttctgaaagagtgttaaagaagaagcataaagtataacaccttgagtccatgatatattttggggaagaaacctcttgcaatctttaaattagcatgaaaagctacaccaccaagatttccatagcaaagccattggatgaagcctcccactcaatgtgacataaaagtaattcctgaaactttggaaagtcaataaaaatatatggaacattaagtagaggtaaagaagggattgtaactaaacttagaataacgaattaaaactctcccatggctttgatatggcaactataaaatgtagggttaccacaaagtttgaaattatagaatactatagtattcttaagaaatattatgacattatatttttaaggtttaattaggtaataagatttgatcctttgatggtatattcagttattcaacggacaatatacgtctacttgtacttttataagtaaatatttatatataccggaggtcaatttctgtttctgtggtaactgccctacaggtaagcttagcagcttttaatgaagtagaattgaaatacttttgggggaaagtcacacttctatttaagtatatgtatcttttttcgggattatgtcatagtgcaatgtaaatcttagttatggtatttagaatgtcagaatgtcacattttgtgctgatttgcatacttcaatagtctggagcagttgaagcagctaaactatttagctctgggaaggttggaattcccgtaagaattatagtgatctatgtgtaacataacatgagaatcagacttcctgaagtatcaactactagaggtattactaataacaacgggccaaaaaagaggaaaaacttcttcaaaggataatggatcagtacttttagccaatttgtgattttaaattttgcctgatggagttcaatttcactctagtcgaggcattcttgttcttcaccactggcctttctgccatccattctcttttctttatggctgttgcaaattttcctcatctcttcttcatacttgataaaattctccccaaaccttgtccaagctttgaatggaacagtaatagtattacggtaaggtggtctcacctcacttaccttcaggaaaattccatatttattagagcccacatcaaagtagaaccttttattgtccactctgaaagaagtcccctctgggagttcaagcgggtcatcgtctccacctcttcgttcttctatgtctccttcgccatagtcttcaatcagctgaaccaaggcatcacgaaactcaatcattccttgtgctgggaggacaatagtctgttcttggcccaaactgtggccaaaataacctatcatgccagtcccccgcatcatggtttgtctaatccgtaggaagcgaccccgctgattttcctttaggtctaggtaatatttcctattgtccctctcgatatagtctgttttcaggacactgtgaggatgctcttcggaccccaccgagactggtggggagggtgccgagtgcttctgcctccttctggagccttgctctttgctgtggccatgctcttgccggtggcctttcaggcccaggtgggcatagtgctcgatgaagtcccctagacagtccttcagctccgctgccacagacagggagagggtcagtttactctttctgatgttgtcctgccggcctctccctatccagacttcggctatctttaggaagcggccccgggagctttgcttcacgtcyaggtaaaacctctttttctggatgtccactcgtttggaggccagctcctggatttcggctgcgcccccggcctgattaggggtggctgaggccgcgtagtgggggtagtgggagtgctgggcctggggatagagtctactcttgcttaggccagagccccctacattcttgcctccgcggccgcggccgccgccgcctccccttcgcctggctctttccatcttcagctgcaagtaacaaacagacacacgggatggggtgggggaggggtgttgagaacaatcgcagacgcccctcggcctgaccgccccgccgccgcccgcgacccccacgccgggcccrgctcccccggcgccgcagcgcggggctccagccactgccggccggttggcggccgccgctccggctctgcccgcgctccccgcatccctccgccgcccccggggccgctcccgcacgccgccgccgcccgtcccgcgctccgcggccccaggtctccagccggcgggcactcacatcatctctgccatcaccgccgccgccgatgcccttcacgaccaccgccgccgccaccgccagctctcggcccctctgctgcagccgccgcagccgccgccccccgcctcctcccccgccgccgccgctcgcactgccccccgccggagcagccgggcaggggcatcgcccgcggcgcccaccgcagccgcccctcctgcggccgctgcgggggccgccgcctgacttcggacaccggccccgcacccgccaggaggggagggaaggggaggcggggagagcgacggcggggggcgggcggtggaccccgcctcccccggcacagcctgctgaggggaagagggggtctccgctcttcctcagtgcactctctgactgaagcccggcgcgtggggtgcagcgggagtgcgaggggactggacaggtgggaagatgggaatgaggaccgggcggcgggaatgttctcacttctccggattccaccgggatgcaggactctagctgcccagccgcacctgcgaagagactacacttcccgaggtgctcagcggcagcgagggcctccacgcatgcgcaccgcggcgcgctgggcggggctggatgggctgtggtgggagggttgcagcgccgcgagaaaggcgagccgggccgggggcggggaaaggggtggggcaggaacgggggcggggacggcgctggaggggcgggtcgggtaggtctcccggagctgatgtgtactgtgtgcgccggggaggcgccggcttgtactcggcagcgcgggaataaagtttgctgatttggtgtctagcctggatgcctgggttgcaggccctgcttgtggtggcgctccacagtcatccggctgaagaagacctgttggactggatcttctcggggtaaagtgtcttcctattcccgttttcccagctccgtgccccggggtatctatagtgctaggcttctgagacacgtggaggcgcttaggcccgcggagcaggcccctgggctgtgtttgggagattctggaaaaacagactttctcccttttcctttcccctctggagcagctgggaaaggcgtctctcggagcttccgccattcagaaagtgtttccccgcccctgacggccccagcttgatgtttaccttgcgcgcttagttaggattgctctttctagtacggcctttattatggcagaaattgagccactacaggtctgcacagcaaagtcgagggaaataacctgctgtctatgatttagcaagtgatgatggatatttttgagttcaaatcactcagtctttaatggattttcttttctttttttcctagttgaatctcagttgttctcaggctaggtttgatatgaaaaatactactccctattgaagagggtaatataattcttaggatgctaatacaggagtctgtaagtcggagtacttcaggctttttatggttcggtacatttctttttaggggtgggatattgggataagtaggacagttcagatcttgatgtcattgaatagtggtgtctacctaaaaggaagaggctggggcacaaaattataatttaaagtgtttacttcagccaaaatgaggacagctgcccaggactcatttcccagttgccttggggagtgctccttcagccttggttacaagcaggtttttaaaggcgaaggggaagagtgggctgagacaaagttggtcaggaattgttattggtttacagagataccattgcttagtgattggctgtacactgtaactcatagggtatgagttatcgtgtccagcatatggcattttatggcttcttggttccagtctagagcccatatagcaggtgggctttaagagataattatccagctcagaccgggagtgagacgggactgttttttcattctaatrcctctctgggcctgataatttaaaggggcttgcattcttcagctaaaattttattttcttttattttttttcccccacagtggtctccctttattaatccaacaaatgtttattaaggactgctctaggcactagagataccaacaatgaacaaaacagacaaacatctctctccttttggagcttacattttagtggaaagagacaggcaaaaagtaaaattataggatgacagaaggtgaaaatagagattaaaaaggaaagggggatgaagagtgtgtgtgtgtgttgtgggtggggggctgtagggagctgcagttttacaataagtggtcagggacgtcctcgctgagaagggaatttttgagtccagagctcaaggaagtgagagaacttaccttgacgttctctggaggagaagaaagtacaaaggccctgggggaacctgcctctttatgttcagagagcaacttaagaggcctagtgagctggagcagagcggagaggaggtcagaggtcaggccagaaagggaaaggggccagaatgtgtaggactttatgggctatattgaaaattggggctttcattctgagggagatgggaagctgttggagagttgttagggaaacgtgatctgaattatgtttctaaaaaattggagtaagatatcataaaatttgccatcttagtcttttttgtatctggccaattccactcagaattcttttttaaacagctttattgagatataattaatatatcatatgattcactcatttaaagtgtgcaatacaatggtttttagtttgtcttcagagttgtacaacctttatcacaattacctttaggactttttcattacccaaaagagaatctccataaccattagtactcaatcccacccgctttcctagcaatcacttacctatttttttgtctctatatagctctcaaaccctatgatattccttctatctaactgtatttttgtactcattaacagcctctcttcattcccaccacccatccatcccagcctctggtaatcaccattctacttactacctcaatgacatcaaattttttagctcccacatataagtgagaacatgcgatatttgtctttccctgcctggtttatttcacttaacagaatgtcttccagttccattcatgttgctgcaaatgacaggatttcattctttattatggcttaatactattccattgtatatgtatatcacattttctttatccactcatctgttgatggacagttagcttgattccatattctggctattgttgaatagtgctgcaggaaacatggaagtgcagatagctctttgacatactgatttcatttcccttgaatatataccctgtagtggatttgctggacccgcttgtagttctacatttaatattttgagttatttccataatgttagtaataatttacattcccaccaacagcgaggaaggagttcccttttctccacatcctcgccaacacttatcttttgtctttttggtaatagccattctaacaggtgtgaggtgatatctcattgtgattttgatttacatttccctgatggttattgatgagcaatgtttcatatacttgttggttatttgtatatctccttttgagaaatgtctattcaggtcttttgctcattttttaaatatggttttttaatttttttatttttttgctattgagttgtttgacatccttaaacattttggaaattaacctcttattagatgtatagtttgcaaatattttatccgattctgtagattctgtcttcagtctgttgaatttgctgtgcagagaagcattttattttgatgtaatccctttgtctatttttgcttttgttacctttgcttttgaagtcatatccaaaaaatcattgcccagatcagcagtccccaacctttttggtaccaaggactggtttcatcgaagacaatttttccatccacaggagggaggggatggtttcaggatatttcaagcgcattacatttattgtgcactttgtttctattattattacattgtaatatatagtgaaataattatacaattcaccataatgtagaatcactgggagccctgagcttgttttcctgaaacttgagggtcctatctgggagtgatgggagacagtgacagttcataaggcattaggttcttctaaggagcatacaacctagatcccttgcatgcgcaattcacagtaggttttgcgctgctatgagaatctaatgccaccgttgatgtgtcaggaggtggagctcaggtggtaacgtgaggaatggggagcagctgtaaagaaaaatgaagcttcgcttgcttgcctgctgctcacctactgctttgtggcctggttcctaacaggccatggactggtamtaatctgtggccctggggttgggaacctctagccctgaccaatgttagggagcttttttcctgtgttttcttcaagtggtttcatggtttggggtcttacatttaagtctttagtccattttgagttgatgctgtatgtggtgagagataattgactactttcattcttttgcatatggttatcagttttcccaacaccgtttattgaagagcctgacctttccccattgtgggttcttggctcttttgtcaaaaatcagttggctataaatatgtggttttatttcttgggtctctgttctgttctattatctgtgtgtctctttatgccagtaccgtgctgttttaattactagagtttagtatattttgaagtcaggtagtgtgatgcccctagctttgttcttttagctcaacattgctttggctattcagagtcttttgtgaggataatgttttcaaggttcacccatgttgtggcatgtatcagaactcgatttctttttatggctgaataatattccatttgtttatattatatatatgccatatttatttattcatatgttgatggacacttaggttgtttccaccttttggctattgtgaataatgctgttattaacattggtgtacaagaatctgtttgagttcctattttcaattcttttgggaatatacctacgtgtggacttactagatcacatggtaagcttttagtttagctttttaaggaactgctaaaactgtttttccatgggagcagtgtacaagtgttccagttctccatatgctcaccaaaacttaatttccttttttaaaaattatagctatcctagtaggtggtgggaagtggtatcttactgtggttttattttgtatttctttaatgactaatgatgttgagcatcttttaatgtgcttattggccattatatgtcttctttgggaactgtctattaagtcctttgcccattttttaattgagtttttttttctgttgaattgtgggagatctttatatattctgaatattaaacccttattgggtgtatgatttgcaaataatttctcccattttgtgggttttcttcactttttgatattgttctttgattcacttttaaatttttatagagtccagtttatctgttttttcttttattacctatgcttttggcrtcatacctaattcccaaatccaakgccatgaagattttctgttatgttttcttttaatagttttatagttttactttttctattggagttttaagtaaattcttgtatattagtgtgatacattttaagttatttttgtatatggtgtgaggtaggggtccaacttcactsttttccatatggagatccagttgtcccagcaccacatgtttaagagtctattctttccccactgaatggacttggcacccttgtcaaaaatcaattggtggtaaatgtatggatttactcctggaatctcaattctattctattgtatttatatttctgtccttatgcctgtaccacamtgttttgattacagtagctttgtagtaagtttagaaattgggaaacatgagtcctccaactttgttcttcttttcaagattattttggctatttggggtcccttgcaattctgatgagtttgaggatcaccttttccatttctgcagaaaagccttttgatagggattgcattgaatctgtagataactttgggtagtattgacatcttaacaatattaagtctttctatgcataaacatgggatatctttccatttatttgtgttttctttaatttctttcagcagcattctgtagttttcagagtacacgtttttcacctccttggttaaatttattccttggtattttattcttttagctgctattgtaaatgcagttactttcttagtttcctttcagattgttcatttctggtgtataacaacagctgatatttcaacgttgatgttgtactctgaaactttgttgaatttacttattagatctagwagctttctttgagatttttatatgggattatgtcatctgtatatagagatagttttacttcttcctttccattatggatgccttttatttcttttccatgtctaatttctctggctagaactttcaatatgatgttgaaaagcagtggtgaaagtgggtatctttgtcttgcttcctatcttaggtggaaagctttcagtctttcaccattaagtatggtgttagctgtgggttttcataaatgccctttatcatgttgaggaaatacccttttattcctagttttctgagtttttatcatgaaagggtgttggattttgtcaaatgccttttctgtgtcaattgaaatgatcatgtatttttcctcccttatcttaatgtaatgtgttatattgattaattttcttatgttgaaccacccttgcctttctggggtaaatttcagtcacttatgttatatagtcctttaaattgtgttatcttataacagaatcactctgctactgttttgagcataggccatagggaaaagcaggtaaaaggtaatatggcttgaaccaacattgtagcagcggaagtggtgagaggaggtcgaattttggctttgttttgaagatagaaccaacagtatttgctgacagattagatgcagaatgtgaaaggaggagatgagtcaggatgaatccaaggcttttggcatgagcaaccagaaagatgaaggtgacttactaagatgggaaatatacaaaaggagcagtttggggaaactttatatctattgagtggaatatgccaattagagattcaaatatccagtaaataattggctatcaaagtttgaagttaagaggaatggtctaggctgtttatataactttggaagtcattagtgtataacagctaatttaaaagccagcagactctaagggagtgagtgtagagggagaagagtagaggtctgtgacttgaatcctggaatgctgtgatgtttagagattggggaggtaagaaggagcagcagagtatactgaaaagggattgttatactgaaaagggattgatatagatggagactcaagaattatcacagaaacctgataaaatgtttcaagaagatgggtgtgattaattgtgtcacttactgccggtacattgactcagatgagcgttgagaattggctataggatttgacaacataaaagtcattggaaaccttgacatgagcccttttcgtggagtggagtggttacagtgggtttaagagaggattaaaggagtggaaacagagatgctattatagatgactcgtttgagtagttttcctacaaaggggagaataataatggagcagttagccaaaagttgagtttttttttcttcttcttttttttagttggaaaaaattgcgtatatgttgatgggtcttttctggcagaccagtagagaggaaaaagttgatgatgtaggagatgggaaaatgtctttgagtagatgtcttygagaaaatgtctttgagtagatgagaggtttgcacacatggagaggttggatgtaggagtactgatagttcatccatagttacataagaaaaggtagatgtattagagttctcctgagaaacagaaccaatgggagatctttatatctctgtgtccatctctatctgtatttctgtctctgtatctatgaagagattataaaagttttaagatctgccaggagacatacccacgggagctaatggtatagttccaggccagttgtgaaggcctgagaaccaggagagcctatggtgtaagttccagtctgagtccaagtctgaaggcaggagaagaccaatgtcccagctcaaagacaggcagagggagcagatcttcccttacttagcctttttatttattcaggccttcaacaaattgaaggcccacccacattagggagggcaatctgctttactcagtctactgaatcaaatgttagtctcacccagaaacatcctcacagacacacccagaataatggttagccaaatatctgggcaccccatggcccactcaaattgacacataaaattaaccaccacagtagagtatatgggtacaaatataattatgtgatatagatttcagggtaagagcctgtggaaattcatttttgattgcttctagtgaaatcggaagcaagatcatcagctaagagtgacgatcggtggaggagatatgaagtttaagtggagaggagaaggtataaaatagtcttaggaggggaggatagtaaatagatkagggaaaagttgtaggattgccaggaagtagtaagggcccacttgaggctggtggtcacaaatttaaggtgagaccagtcaaaatggttgtgcttttcacctgctgcattcattcagctgcataggtacaggcacagagtaggtcaagagttcttttttattcggggttagagttttgccaggagatagtaataaagccagaagggcaatgaatttgagggagtatgcaaggaagtggctgttaacttggagtttaaactagtcaagaagagaattaaggactgcccaaggggtgaggacaatgatatggtagcagggcccttaaaagccccagttagatgaaaagattgttggaattgagtttctagagggaatgaacttgaaaaacaggaggtgttggttggagagtgggatatatggaattgagattatggaaggattcagtcgttggtaataacatagtatctttgtaggaataaataggtggagcaggatgcagacaagatcactggaggagggctggtcagaagactgggaggcactatctcccttggatattatacatcaaagcttgtgatctactagacaagtagtggggaaagggtaggatatagatattaatggctatagttttgatggtgatggtcatggtgatgatgatggtccattaacactcaactcaaataccatcaatttgatttatatctaacaccacaaagttaggtgttgagttacatgtggttatattgtaactaatagtcarcccttcatggacttctattctttgatgagactcttcttgtaggagtagtaggtgccttaaagcaccttttcatagttgtcagattgaaatccttcaccagtgttttaggttaaccctgttactgtggaagtttctcttggctttctgtgtgggctgcttctttgtctagttttaccttttggggttagcatactattgtgaataatttattggtgagaaggtaagcagagaagtagagtactctatgacctagtaatttcatatctaggaatctatcctatagaaatgataggaatgccttacaatacccacatatccacaagggtattcattgaacgttatttttggtgaaattcgcaagcaacctaattatcatcaatagggaattgttaaattatgatagataaaatggaattctattcagtcttcaaaaagtcagatcaagaagtggtcttacattttaattatcccatcctgtcaacaagagtgtcttcagttgcaagtaatggaaaaaccattcaaactgacttcagcaataaaaggttatttattggtctgtttcatggagacatctgaggtagagtggccttcaggcaagttcactcagggatccgactatttttctggccttattcttggccctcttctatgaaaacaccttcagggtggtttcttgtatgcttgtaagatggctacttgcatcaaccatgaccacatctagcaggagcaaaagcatcctttcccrtaccagaggagagtcccgaaatttgttgcaattggactgccttggaagcaataattatggccaggagatggaggctagagaactgagacctgatcatagctcctatccttgaatcagttgtatagcarggggaattggattttccttaagacagttggatttcacctgtagtcttggtgatgaggtcagttccatccataaaactttgctgttacacattttgggatggggtgaggagggctgaatggagattaggatgctattgaaatttgctgtacacaatggatcattatcgtcttctttcttagtgttaaggtaatcagcctctttttcctcctcctatgcttgactttactaaaaccatgagacatgtttaacctcaggactccaatttgaaaaaatatagactgttatttactttattacttacagaagcccttcatactactctcagcaagaaagaggtaggcagggagtgagggaggggggatcatgcttactgagaaacaaactatcgagtattgaaactcccccttcatatgcctgacctcagtcccattcagttaccagtaggggcccctattaattggtacctcaccagcttttgctgttcgttcataaaactgagtcattgaagtacagtagaaaaataattggactacaagataacttatttccttccataattgcaaaatatctgatttttcttcttgtttgtattatgtaaacttaccctgtctgagggtcctcctggattgttctttgcatttatatatacatagaatttcattttcttttttcttgttttttttttagacggagtctcactctgtcgcccaggctggagtgcagtggcacaatctcggctcactgcaagctccgcctcccaggttcacgccattctcctgcctcagcctccccagcagctgggactacaggtgcacgccgccacacccggctaattttttgtgtttttagtagagacggggtttcaccatgatagccaggatggtctcaatctcctgaccttgttatctgcccgccttggcttcccaaagtgctaggattacaggcgtgagccgcttgcccgaccttcttttttttttttttttttttttttgagacgttgagatagagtctcactctgttgcccaggctggagtgcaatggcacgttttcagctcactgcaacctccacctcccaggttcaagcgattctcctgcctcagcctcctgagtagctgggattacaggcgcccgccaccatgctctgctaatttttgtatttttattagagatggggttttaccatggtggtcaggctggtctcgaactcctgactacgtgatccgcctgcctcggcctcccaaagttctgggattataggcgtgagccactgtgcccggccaatttcattttctattttgaaatttaaactaccactgacacttcgttttccctctgttttacttagcatttatcttagagaataatcttaatatgtatagttctattttattcttttactggcagcttagtatgccatattttggatgtgtcattgtttatttacctattaatttaccctataactgcttcccatatttttgcttttacaaagggatgtaatgaacatcctttacatacgtctttgtgcatatgtgcaaatatttccataggatagatgtaattactgacttgaaggttatgcagatttaaaattttgatgccttctatgaaacatctttcaaaatggtgatgccagtttcttctctcgtaattactgcatatggtcaatcttttaaatttttgctggtaatgatatttcaaaattataaccagttttttggcctcatttcttgaataacttgttttttctcaaagataagaaatgtctccttcatcgtatgtcaaatttccatatttacatggatctatttctggacatggcaagttttatttatttattgtatgtatttacggtgtacaacatgatgttttgatacacatatacgtagtgaaatgattcctacagtcaaacaaattaacatgttcaccaccttccatagtctctgcagtcttcaaggttttctctatatgggattagacatgctatgtctgatctgtttttgtatttttacaccaattccacactaattttttttttttttttgactgggagtctcgttcttattgcccaggctggagtgcaatggcatgatctctgctcactgcaacctccgcctcccaggttcaagcaattctcctgcctcagcctccctagtagatgggattacagcactcgctgccacacctggctaatttttgtatttttagtagagatggggtttcaccatgttggccaggctggtctcgaactcctgacctcaggtgatctgcccgcctcggcctccgaaagtgctgggattacaggtgtgagccacctcacctggcacacactattttaattactgtagttttaaaagtttcatatttagtagggtgagtttttccttgttggtcttgtttttcaaaaaaaatttgctgctcttgagtattttctcttcccagtgaactttaatgtaaactcacgtggttcaatgaaaaattctgatgactttttttcttggtattgcttcttgagtgtattgatttaattaatatatttacagttttgggtctggctgtgccgaaacgcagtgtgtcttatccagtccttttttaactgtcttaataaaatttgctggttatctttaaaatggatcttgtatattttatgttaggtttattcccaggcaggttgtcatttttgctgttactgattttggatataaattttggatataattgtataatttggacttggatataattgtatttgattctgtcttatatataaaaatgagataggataataatttatcctaggataaaaataatttgagtatccttattttgcatctggtaccttacttgctcctgttaaacaaatagataaaattacttgtcttcaaagagatcctgtggaaaaattatttattttaggagactttggagctttgataaaaattaggcttatcttttgtaaaagctggttagtgatagcaatcagactcttttaaaggtgatttttttttctttcctttgataaaatgcttaatatgagggaggattaagaaagaggatggcttttgaacagtttcttcatggggaaataagaaattagaataatttcatgttctccaaaaaaaggagaaaaatgaccttccctcctgagcctacttcaagcctctgtttctttctgactctattgttctcatctctgcatttttccaatctcttctactgttagtgttttaggctagctcctcagtggagggcagaaattcaccttctctttagctgtctttgaaaccaagaagatagaggtatgagatcttcgtagtctgtagtaagaataatagaagccatcagaaaaaaatatcaaagctttgtagctgctcctggaagttttgatgtgaagcaggagacatcacctattggtacctgacttgcttttgctgttcattcataaaacagagtctctgaaatacagtagaaaaataattagactggaggataacttttttccttccaggaattacacaatcacaaaattgctgatttttcttcttattcatgttacataaacttatcctgtccgaaaagactgtatttgaacttactatgtaaratttgctttaggtaaatttatggctgcttccagaattgtgtattaattttccagtttcttttttaccagtctccacttttacctttccctcttccccctatacttaaattggtcttactgtaaaatttatgcgtttctctttctacctggcaatgctgattttttttttttttttttttttgaggcaaggtctcactctttcacccaggctatagtgcagtggcaagatcgtggctcactgcaacctcgaatccctgggctcaagcgatcctcccacctcagtctcccaagtagctgggactacagatgtgtgccatcgcacctggctcatttttgtattttttgtagagatagtattcgccatgttgcctaggctggactcaagccagcctcctgccttagcctcccaaagtgctgggattgctggcacgtaccgctacrtccagccagggctgagtttctgaatcatcattgcagcaagagaaattggattacctttagaccactggctctactgtgggctgggagtgggacaccttccttaaagcgcattggacattggctttgtgggtaactgatctttacctgaatgaaatttatcagtactgtattaagggtctagggtggaayggatgctagcaaggcaaccgttaacatccacttactgatgaatcctataaaattttatttcaggccatacgaagtaacagtaataaatataaaaggaaaaatagacaacctaagcaactttttaaattgacttacttgaaaactttccctgcaatttcccggtttataatggttgatttcagctgactggctatagctacttagagaacagaggaaattcattaaaaataatgaattattcagttgggtagtgaaatccagttataaagcacttcgctgtgccatggattcagttcaggtcaagtgatgttcctggtttatgggcagtgtggcttctcactatgacacagcaaagaacgtagcttttatcctttacccttgttactaactaaaattaatggcattttattgtgtttatttgtttgattccatttacagtttatttcacttggttttattagtacaaaattgtgctttatataatatttgacagttaggaaaaattgttagatacctataaagaaacaagtctctcaaaaatcatcctactacttttaaaaattacatcgtcttactacagttaacctagatgtgaatgggtagttttatttagcttttctggtttgtttgcttggtctgtttggagggaagttaagattagcagaaatgtagtaatagattcatgaaagtcttgaaagcttctttaattagagaatttaatgagggctttggcatgcattctttggtttttctctgttttcctctaccccttcttattctttttggttcattgaaaagtagaaagaaattctcaaaaaccgtacaggagaataccttataaatgatatcttctgcaataaactatagattgtatatatgtatatgtatctagatacacaatctgtgtgtgtgtatatatatgcwtgtgtgtgtataaatgtataaattagttactagtatatacgtaagtataaaamctcaatgtgcaaggttacattttcagaaaatatgtaatataataaaagaaatcaagcccagaatttttaaaaagtttattgcgctttctgttaaaaatgaaaggctttttgactggaagctgcttctcagtaaaaataacataattgtgttggtgaagcccaaagattctaatgaaaattagggtattgacaaccaaacggaattgctggagtacttaagctgctttggttttgtaatctttctgtgtcagaatatttgaaaaacacttattaatccagtcttgtaacttatccttgaaatctcttttttaatattcttttccacacacatgaaaagttagatgagtgtatgaatttctgttgtcagactagttgtaaacctcctaaatatagtttctgcagtatagttaaagagaaagaacatcctggctaacacggtgaaaccctgtctctactaaaaaaaaaatacagaaaatgagccgggcatggtggtgggtgcctgtagtcccagctactccggaggctgaggcaggagaatggcgtgaactcaggaggcagagcttgcagtgagccgagatcacgccattgcactccagcctgggcgacagtgcgagactctgtctcaaaaaaaaaaaaaaaaaaaaaaaaaaagaaagaaaataggcccagcaaggtagctcacgcctgtaatctcagcacattgggaggctgaggtagggaggattgcttgaggccaggagttcaagaccagcctgggcaacatggtgaaactccatttctacaaaaaatacaaaaattagctgggcatggtggcatgtgcctgtagtcccagctacttgggaggctgagtgggaggattgcttaagcctggggaggttgaggctgcagtgagctgtgactgagcaacagagctagactctgtctcaaaaaaaaaaaaaaaagagatgggttttgaaattcagtactttttttgagtgaggtccaatgggtcagaaagaagcattggataaatgaatccattttctcttctctgtttgaatttgtaatttgaaagaatattctacctataaagtacttcagtgcttaattagctgtcagtgaatttatatatcttatctaattcatatggatttgctatttttatctgtacctacagattcctgacctctctaaggggatcccagtatactatagggaatgaggtataatagaagtaaaagacctatcactagtcctgtcatcattccaactcatgtgtaattatagtttaaaagaagtgacatcatgtgtattgctgtttatctttacattaatcttgtggtcaagaaagcaaatactataatatataataattatataatatcataagacaagtaatataataatgggaatataatcccattttacaaatgaggaaatgaaaatttagagaaataaagtgacttgtccagggtcacatggatactaagtgaccaagtgtcaaagcagaattttccaaataacttaaagataattcttgtacaaatatagaaygaacacatgtcatatgtgttgtgttaatgagggaaccagaaggatgacaacattggttcagagagatgcaaagataaatatagacattggaggaaaaagttggaaataagattgttaggttagatacaaagctgtgttataggccaataaaaaccatagactttgaggttatcttttttactggacaggattcagttacacctttatgagaccaaaatttattatttaacatgtggatattagagtctgagttttaaaattattagtaaatgaccgtcaaataaagatatgtcccctaatgaaatactgataatcgctgggtgagcttgtgctcctatatgacattgaaatgacatactgccctctctttgtcttctaagttttggatacttttttttttttttttttgacacaaagctgcattagaacctaggtttcttgaytttcagtccagatttctttccactctacttcctgcttcttcatagtataattttcaacactagagcagtctgcataacttttgcaaaatcagctagtctttcttattagttttcctttgtgcaaagtgatgtagatacagctttcttcttcagagaaacattgtgaaattcaatgaatatttgtaaaatttgcatacgtgcccaatgtgagaaattgaaattattacttaagtattgcaactgttcttttaggatattttgtttgcaaatttcagagtaattataaatattcttgcatttttattgtaatcagtatttataaaacagtgtatttcatcacattaacctttacatattttgaataaaatagtattgaaccattttaaatagtaagtggaaatttttccacattaaacagtataacgggctaacagagttaagcattgcattatttaactaataattttttcctgaacttcagattattatctgtatgtgtcatataacttgacaattttttttttttagtgctttttaaaaagagtgggatactttattcagtttagccctcaagcaattaggcaagtcagttaccatggtaacagtaggtattaatttccttacctagttrgaggttttatgaacaaagaaatctctgagttcatccaccaaaacccaactttctcttgagactggcctcttgagactggtgttaaatttgtctattttctagaagatgacrctattctaagtggaaaatacggttctcttgaggtgaatttctactctatcaagagtgaagtagagtatggcttaaaagttaagtgattaaaaagctaccctttcttagctaatttgkaatgtaattggtcttaatttttctaaattcgttctaaccaaaatcttattggcgtgatttctattgacatgaactagaagtgacttcagcagacaacttgtcccaatatctaaatgctgtcaaatagaatcacttaagatgaatttcttccaaaacagagttcacaattttgacagataatctcttagcatttaattgactagtattaccaaccttatggaataggtccactcgtttagctatcatgaggaccattttgcaactaacttatcaaaaagccttcaccaagaagttgcatatcttattgatattttagaatgcgattatggagattaaaaatcaccacaatgggttgttaataacgccagccttgaactttcagttttagagcattttatctgtgttctgtagtcaaagttggtaaggtgtccagtgggtcatgtttgacttgctgcttgtttttgtactgtgtgctaaatggtttctacatttttcagtggttgaaaagtcaaaagaagaataatattttatgaaatttaaataaatccaggtttcagtgtctataggtaaaatttcattgtaacgttgttatgcttaagtattgtttatgacttctttgctatagtgacaaacttgagtagttttgacaaagatcatctggcctgtaaggcctagaatagttactgtctaaccctttagagaaaaaaattgctggcccttgttctatagtatgaaaaaatatagccttgattattcattaaaaaattattttcccattttattgacatacttttgtcccctgattgttaaaaggaatgcatgttcttatagaaaagttggaatatatagaaaagtataaagaacaatatgaaaaaccatttgcaattgtgagataaccactaatgttttggtatacattgctccagacttacacacaaacacacacgcgtatttattttatacaattagagtctaattttttttttgagacagtcttgctctgttgcccagggtggagtgcagtggcaagatttcagctcactgcaacctctgcctcctgggctcaagtgattcttgtgcctcagcctcttgagtaactgggattacaggcgtgcaccaccatgtccagctaatttttgtatttttagtagagacggggtttcgccatatgcccaggctggtctcgaacccctggcctcaaatcatcggcctgccttggcctcccaaagtactgggattacacacgtgagccactgcgccttaattttttaatttgcttttttcacttgaataattataagaacattatttttaatgactgtgtagtgttctgttttatggatgtaccatacttaattatttagtcataatttattattatgaggttgataaacatgataatcagattgagctcaagaagctagttatagggttgcacaattaatgaatcccaggtacctcgctgggttgctgaggctgctatttttttcctgcctgtttggaacactgtgtttgggaccaatgaggcaaaagaaattgaagagctgccattttcaattattctattagaagatacattgaagatttgtcaaatgacatagacacaacactaatccagaagattatttaatcaaaaaggcattcatttcagatatgaattcataaacatttgtaacgatcctcagtttgaagaccatatagaatccctgaagaactggaagacactatttgcttggcaaagagaagtccccagaccaactggggatgaaatattcaaagagataaatgaatactttgaaacatacaaggtactatggaaaaagagtggaagtttgggacaggtaatgacaggaagatataaaagctttacattaagttcaatctaaaactttattccaagtaacaggttgtcttattcatggagaagcagttgtaaattaaaacttgcctgtggtttggaatttcacattaaatgattacattaaaaattcaaatggtgaacctaactaaatccaagctcctacagtaccttcttttcacctttaggtgaagaaatgcggtgagctattttattactgattatgtggacagtccaaaggaaggttcataagcgaaaaggaaaaatttaaattattccatgtgagcgattcttactttgcagatttgttgaagtgtagttactggcttcaaaaagtggtatccttaactgacattttgaacacttgaattcactcaataaaaaaatgcagtgatcatgtggaaaatacattaaggtatatgacagagtttatggattcagagcaaaaattcagctttggaaaagtgaagttaaaatggttttttaagtgatgtttaattggtgttatttgaatcctaaagaagaattaatagtactagtagaggaaagtcagtgtgtctgtgacaaagctttagtattattttgaaatacttgatataaaaaagttcacgtttactcaaagcttacttaaatcatcagaataaattaacatgtttcttaattaaagaaaaggagaagctattagacttaaaaaatttttgcacccttgaaatacatacaatttgaagagattaagttgttggaatactggttaatggtgaaaaaggagttttcagtctatgaaagcaaagccttctcctttgccatttgcttttttgtagtggttgctatgtagaattcgaagaaaatattgttaaaaagtcttggtcaggagtagagtgtagcatgaacccaatgcattttaacgttaataatgaggaaaaagggaatgcatgataatttcatcaagtcagaaaaaaatggaaaaagaaaaagaggaaactgaagaaagtaactgatgaaagtaaggtgaaagggaaaacaactttttataccacctgtgaatgagattaattttcgtttccatactgaaagacaaatatattccaattaagccattcaaaataaaaaacaatttttttttggtaagagatgggatctcactatgttgaccaagttagtcttgaactcctgccctcaatcagtcctcctgcttcagcctcccaaagtgctaggatttcaggcatgagccactgtgcctggccaaaaccaaaattaagcaacaaaacaacaacaacaaaaattccagacagcctttaaaataatgataaaggttgaaaaattgtagatagtggtaggtagataagatttcaggaaaagtccaaagcaaatcataatacgttattttaaaggggggtttaaaatcctttaaaggtacaatgtgaagcattatgaaatgataaaatacatgttttttaaaaacattaattttattttaagttccaggatacatgtgcaggacgtgcaggtttgctacataggtaaatgtgtgccatggtggtttgctgcacctatcaatctgtcacctacatattaagccccgyatacattagctgtttttcctgatgctgtccctcctccaggacccagtgtgtgttgttccccatgtattctcatcgttcggctcccacttataagtgagaacatgtggtatttggttttctgttcctttgttagtttgctgaggataatggattccagttccatccatgtccctgcaaagtacatgatcgtgttcctttttatggctgcatagtattccattttatatgtaccacattttctttatctagtctatcattgatgggcatttggtttttttccatgtctttgctattgtgaatagtgctgcagtgaacatgaacatgtgtgtgcttgtatctttataataaaatgatttatattcctttgggtatatacccagtaatataattgtataacccagtaataggattgcagtgtcaaatggtatttctggttctaggtctttgaggaatcgccacactgtcttccacaatggttgaactagtttacattcccaccaacagtgtaaaagcattcctatttctccatagccttgccagcacctgttgtttcttgattttttaataaacgccattctgactggcatgagagggtatatcattgtggttttgatttgtatacaaaaaagatttgtatttctctactgatcagtgatgttgagctttttttcatgtttgatggttgcataaatgtctttttttgagaagtgtctgttcatgtcctctgcctactttttaatgggattgtttgttttttttttcttgtaaatttgtttgagttccttgtagattctggatatagacctttgtcagctggatagattgcaaaaattttctcccattctgtaggttgtctgttcactctgatttgctgtgcagaagctaaaagacatgattttagaaaaagacatgtcaaagtcatacatgctcaacgacatagcgagtacatatgtaaataaaaaattattttatgctgtgaatttgaccgaaaataacctttacctcgtcaggaattacaatcctcacgtatggtaaaggatttccctattgcaaattattccacaacattaatgttctgtgtgctttttatctatcccaagatacaagtaaatttgacaaagatattaggtttgtaaacaaatttacgttcaaatctttgcctggaagtatctagatagaattttgcatgcaaaagagtatttacatctaaaaaattacatatttcaaattaaaatgattttagtgttatagatagaaggaaagagttattgaagtttatttctgttttggcagtgtaaatgaattacttacaaaattttagaagtctacaggtgtttttataaagtttgtgttatttgtggaaacctcagttttctggcattttgccaatgaggtctactctaagtatagcagaaatttgttttccagctttataaatatatattttaagattaagaactgattttacttatataatctgggatcaacttttggcttctcctgtcaaggattttgaatttgtgacaaaatatacacttattgataaccagtgacatatataaaatgctttacaattaataaagcatatgtattttacatattttttcactacatatgacgcatgtggcaaccccaagagttgagttgtacccatcggcaaactttgatcatgattctgtgaatataggcaagcascaattgcaggtagaacattctttttttgagtcccaaaccgtgagaaacaaattacagaaatgtacctttcttttgcattaggacacgttgtagttttgtatgaacactctagttttaagcagtatgtgcaaaaacattgcacaaaggatttgtgtgttgattttgggactcctgtattattaattatgtggtttatttgactaccccacattttcaagcataaattaataaatccataattccaggcttattaacaataaacaatctagatagttgaactctttcttgctaacattttctagatatggactgtttggtatttttctactaataaagacccttagtaagctgccttctggtttgatgtcattgggatgtttactgggaactttggtggagatcttgcagtctctctcccccagtggtgaaagaatgagttacaaaccagctttccttcccagtgtacaatagcgatggagtttgttctatatggaaaatttgtttgataaaagtattctttaaaattttttgttccataaattatcagtattttcagtttctgattcatgcttgggatagttgctgcatattgtttaattttgtcagaatttatattgttaaatatcaaatacgacagactaccctcaaatcataagtagttaatgtaattaacatcctgtttcatcatgagactcttcagtgttacattaaaaactgctacctcctgggccgggcgtggtggctcatgcctgtaatcccagcactttgggaggctgaggtgggcgatcggatcacgaggtcaggagattgagaccatcctggctaacatggtgaaaccccgtcgctactaaaacatgcaaaaaattagccgggcttggtggcgggcgcctgtagtcccagctactcaggaggctgaggcaggagaatggcatgaacccaggaggcagatcttgcagagagctgagatcgtgccactgcactccagcctgggcgacacagcaagactccgtctcaaaacaaaaaacaaaaaacaaaaaaactgctacctccttattacaaataggaactaaagttgaagtttgaggaatttgctaagaactaagccttgaactaaggctattttatttgagtatgagtcatatcagggtacggatccattttactattaacaaaacaaatatgttctkttttttttttttaaatgcacacaccacgtttgagagattcttattcactgtattttctttaattatacttgaattttggtttacattgaggagtgccctcaaagatattaacagatttttaaraaatcctctaaaaaactcattcttagggaaatttgttcacttactaggtraggagcaaaataaaaatccttaatatagaagagctattatctgtcttcaaaattaagtctttgagtagatttgtgaataaatctaatagttttgctgaatttacttagatcttaagacagaataatcatgtagaaaatttaaaatgtcaggaattcataatgattcatatacccaaggattttcattgatagtraggtaaggttattcttgagaaagactcaaagtcataaaataatagamtttcgaaactaccagaattatacaagtcaattaaaatgactgatttgttttaagaggaagaaatactaaatgtataattattagatgcagcatattgtatctgttttgttttgtgattctagctcttataacctatgcttggacctaggtgtcataacttactttaaatatgtatgtttggttttcattcatattgacagtactacctctcagttttctttcagatattgttttgtatttacccatgaagacattgtttttyggactctgcaaataggacatttcaaagatgagtgaaaaaaaattggaaacaactgcacagcagcggaaatgtcctgaatggatgaatgtgcagaataaaagatgtgctgtagaagaaagaarggtatgttgytcattgactattctttygggtgagaaatttaatttatatttgactgygcaaagagtcagttgttacttgtaaacttcaagtcattgtttaggtcagagttgctgttgtctaaatgcaccaggacctagttgttgaaagggtaaactggaataaactttaattgggtttacaaaatgagaattcttactgtatattttctctttttcgggttgactttaccagtttgttctagttcagataatttagacaacattaactttgttgaattttttgtttgccagccggtcttcagcattttaaggcaacattattattacagttgtaatacgaatataattaccagagaaraaactcaggaaaataaatgcytttatgaaaatgggattagaggtttgaaaataaacttgttaggagaaataatttcacaatgggatggttttttctttgttaagttttctttatgacttcattagtttataaaacattaattgataaaacttagaactataaattgaatgcttcagtgaactttattatttcagtgaacatttgttatttgatgtgaactttgtgcctgttttgaaatttactaaactcaaggcatgtgttcrgaagagtgtttttgaagatgacctccccttcttagaattcactggatccattgtgtatagttacgatgctagtgattgctctttcctgtcagaagatattaggtaagtgatttgaatttcctgattttatttgaatttggacccttagaaggtactattatggtaatgtttgtgaatatactgagttttacaggtgaggtgtgttcaatagataattatttctatgtatacactatcaccaagttttacatttcaaataaaagtcactgaattaatttgtaatctgtcagtttgttcattcataagcttttctattacttcagacagtttttttttaacttttttaatatatgtgctgctgaagcgagcacgacagttttttaactttcagtacttaagatgttatatatagagctactgaacatactgtgtttattttaccaatttagggaaaaagtgcaaaaattatttaacctttaaatgcacctttatatttcattaaaaatatcaacatagtaatattgaataatggctatgatcggctctgttgtgtgtaattagtaacagttgtagcaaatgatccttaaaaaatgttctaactaaacattagaggccaggcgcggtggctcaggcctgtaatcccagcactttgtgaggccgaggcaggtggatcacaaggtcaggagattgagaccatcccggctaacatggtgaaacaccgtctctactaaaaatacaaaaaattagccaggtgtggtggcgtgcgcctgtagtctcagctactcaggaggctgaagcaggagaatcgcttgaacctgggaggcagaggttgcggtgagccaagattgcatcactgcactccagcctgggcgacagagtgaggctccgtctcaaaaaaaaaaaatccaaaaaaacaaccccacaaacaaacaaaaaacattagaaatgtctgttagtacttttaaaggttgccttgtaaaattaggactgcaatagtgcaatctaaggctctcaaagcataaaacaagtaataaggaattcattcagatattttccgaggtggttatacctgtcttttaaaaaaaaaattttgttatatattgggttaaaaaaagcagaggtgctgggcacagtggctcatgcctataacccctacactttgggaggccaaggcaggaggattgcttgagcccaggagtttgagaccagccatagtaagacccccatctctacaaaaaaatttaaaaattagccaggtgtctgtggtcccagctactcaggaggcctaggttttgggcccgagaggttgaggctgcagtgagccttgatcacaccattgcactccagcctgggcaacagggcaaaaccctgtctcaaacagacaaacaaacaaacraaaggcagaggtaggttaagctrtttattaatggtcttctactggtatagatataagctagaaataacattcaagtgtttttacttttactacagttatctggccactttgggactcattatactgaattagtttcacagaggaggtaaaatctgttgtttatgattacatattaactctaccattttaccttcagcattgctrtagtatgtcatatctgaaggcaattagcacaagtgacttgaagaattgtagttttgatgacttatatgtattttataaaaggcaggcagagtttttgtgtttgctttcccctcctctggacactttaaatttttgctaccacaggtttccaacaatttgattatgatgtgcccttgtgtaatgtggttggtgtttatttggcttggagttcgttgaatttttttgatctgtgtgggcttatacctttaatcaaatttgaaaaatgtcttcagatcctttttcctcccatcctgttattcttttctctttctgggactcttagtacacacaagtttgattgcttgatactgtgtcacaggccactgaggctctttcctttcagtcttttcttctttcttcctttttttctttctgtgcttcattttgaatagcttgaatagttttgtttcctgtcttcaagttcacttatatttttttcttctgtagtgtctggtctgtttataccatcctgtgaatttcttttttagatactacatattttgtttatctctagaagtcccatttggttcttaatttttttttccattttggctctcattattcatgtttctttcaaaattcttgaacatatttagcatatttttaatagctgttttaatgtacttgtctgttaattccattattctagggtttttttctttctattggatgatttttctcctgattatgggttatattttcctgtttattcctacagctgttaattttttttttttttaattaggcattgtgatcttactttgtggaatgttagattttattgttttcctttaaagaaaggaactttgtcagacatctaagttacctgaagatcaactttatgttttgaagcttgttttcaagcttgatcagggaaagtctacgtttgcctttagtctaaaggtaatttagccctataataagatgtgacccttctggagtctttgtagactgcctctggtgatcaacgatctcttctctgacttttcagaacgttaatgcctcttacctttgtgtaagtccgtcctaagaatcattcagcttatggttgtttgcccagccccatagagttttagtctatgcatgcttgtcttcgtattctgcaaagaccaaaggagtcccttagggagatttctggagctcttttcctgcctagcttcctcctctccagaactctgccccgtgagttccaggtccttcagcttccagggctctgaactctgtctccccaactcagtgctctccttgggattcttctccctgttctgttgtctgcaatgggtcccaggaagaatgtggggcaactgtaaggttcacccttcatttcccttcccttagagatcatagtcctgtactgcctgttgtctagtatctgaaacagttgttttatatgttttgtccaagtttagatttgtttgtggtgggagggtgagtctggcctcccttgttatatcatgttgkcctgaagcagaagctgagtttcttttattttttaaatatagtttcaatttttaacaactattaaataggcaagtatcaacaacaatagataacaatataatagatatgcatattcctcccactttatcaaatcttaattttcttcaatttttttttttttttttaatagggtctcactctgttgctcgtgctggagtgacagtggtgtgatcttggttcgctgcaacctccgcctcttgggctcaagtgatcctcctgcctcagcctcctgagtagctgggactacaggcatgcaccatcatgcccagataatttatatatatatttttttatagagatggggtttttgccatgttgcccaggcggtctcaaattcctggactcaagcaatctgcctgccttggccccccaaagtgctgggattacaggcgtgaaccactgcgcctggcctgttttcttcagttctttattaagaaatgaaacagtaaaatacagctgaagccccgtgtttgttctttctgattctccctctgtgcccctctgagataacttctatgagttttgtgcatttttttttctttttaataaaaacagggtcttgctctgttatccaggctggagtgcggtggcgagatcatactcaatgcagcctcaaccttatgggctcgagtgatcctttcgcctcagcctctcaagtagctacaactactggtgtgtgctgccatgcctggctaattttttatttatagtttttaaagacagggtctcactatgttgcccaggctagttttgaactcctggcttctagtgatcctcctgccttggtctcttacttaaagcactgggattacaggtgtgagccactggctgctcacatgttttttataatagtacttaataattttatgtctgaaaatattatataatgttattttgcccatttaaaaactttaaaaaatgctaacaaactgtgtactctgtaacttgtcttttttactcaacactaygtttttgagaatttttcttgttgatctgtgtagttccattttaactgttatatcttactatgtttcattatgcaacagttggttcaatccattctcttgttaatggaaatttagtttgtttctaatttttgccagtaggaacagtgttgcaatgcatattcttaaacatgtctgtacacatctgagggtttcatttatttgtgacaaaacttgccaggtcatagtgtttatgcaccttcaactagatattgtcgttgtcaaagtttttttccaaaaggattttaccaatttatacatgaaccaccgatagatatcctcttaacacgtggtattctgaaacttaatttttaccaatcagatagatgtgaaatcacgtagacttagtttgcatttctttgacttctagtgagaagtagtgtcttcacatattttttggatttttaaaatttattttttatttttgtttttcttagagacagggtcttgaacttttacccaggctgaagtgcagtgatgcgatcatagctcacgctaacctcgaactcctggactcaagtgatcctcctgcctcagcttcctgagtagctgggactacaggtgtgtgccaccaagcccagctaatttttaatttttttttttgtagagacatgctgtgttgcacaggttggtcttaaactcctagtctcaagcagtcctcctgccttgactttccaaagtgctgggattacaggggtaaaccaccatacctggccatatcttttggatttattggtcatttggattttcttttgggaattacctgttcatatttttctccatttttctgctgaataatttgtcttttcttacttatttttcaagaaattttacatattttctggctgttcattgtcagttgtatgtgctccagataacttgaacagtctgtggttgccttttaatttttgaattatgtctttagttatgcagaagtttaaaattttarcataaattaatttacactatttttctcactttagcatgagtctatcagatggggatgtggtgggatttgacatggagtggccaccattatacaatagagggaaacttggcaaagttgcactaattcagttgtgtgtttctgagagcaaatgttacttgttccacrtttcttccatgtcaggttggtatctctacatttcwtttttatatggctgataattgtaatatgtcaactttatccctataaaattaagttcttttattagctggccgttctctcattatctcaaatttatttaagtatttatgttctacctgattcactcacattccttgttttatttaattttcacaacrtacctgtgaggcattgacattttttctgttttagagaagagaaaactgaaattttaagaggctaaatgaccaggatatgtactgctattgctagcaggagtggcattcaaactgattattttttcttgtcatttatcaatcaggactgtttgctttagttaagaaatactcaaggtcaatgtgtttctgaatttaaaattactgttaaatacaaatttayacataaacatggtatgtataagaagtaggacataaatccatcatacttgacagaacttatggaaataacaagaaaatgttacagtttttccccagggattaaaaatgttgcttgaaaataaagcagttaaaaaggcaggtgtaggaattgaaggagatcagtggaaacttctacgtgactttgatatcaaattgaagaattttgtggagttgacagatgttgccaataaaaaggtaaaagcaatatatatataattttcatgatgaagattattttgtgttacacagaatgtactttctatctgaatgttagatttttttttgaaaaagcttgttatataatgtttttgtagcaataaaaaagttccaagtgaatgttctttaatgaaaacctttatttatttatttatttttaacttttgtttcaagatcggggtacatgtgcatgtttgttacacaggtaaacttgtgtcatgggggtttatcatacagattattttatcacccgggtattaagcctggtacccattagttatttttcctgattttcttcctccctcctcccaccctccacctcccacagtgtgtgttgttcccctctgtgtgtccatgttttcttatcatttagctcccacttataagtgagaacatatggtatttggttttctgttcctgcgttagtttgctaaggataatggcctccagtgccatccatgtccctgcaaaggacatgatcttatttattttttttatggctgcatagtattccatggtgtatatgtaccacattttttttaatgcagtctatcattgatgggcatttaggctgattccatgtctttgctattgttaaatagtgctgcagtgaacatatgcgtgcatgtgtctttgtaacagaatgatttatattccttttggtatatacccagtaatgggattgctggggcaaatggtatttctttctttaggtctttgaggaattgctacacagttttccacaatggaaagcctttagttctaatccatgtcttggcatagagtttcttttctttttttttttttttttgaggkggagtttcgctcttgttgcccaggctggagtggaatggtgtgatctcagctcactgcaacctccacctcctgggtttaagtggttctcctgcctcaggctcctgagtagctggggttacaggcatgcaccaccatgcctagctaattttgtatttttagtagagacggggtttctccatcttggtcaggctgatctcgaactcctgacctcagataatctgcctgcctcggcctcccaaagtgctgagattgcaggcgtgagccaccgcacctggccggcagacagtttctttttttctttttgagacagagtcttgctctgtcgcccaggctggagtgcagtggtgcaatcttggctcactgaaacctctgcctcctgggttcaagygattctcctgcctcagcctcccgagtagctggcactacaggcgtgccaccacacccagctaattttttgtattttttttagtagagacgaggtttcaccgtgttagccaggatggtcttgatctyctgacctcatgatccacctgcctcggtctcccaaagtgctgggattacatacagtttctttaagcaagccttctcttttccttcctcccagttcttggtactctttcactttcatatatttgcaaatgtaaaattgtgttttaggtgtatatttttaatccatgtataccagtaacttaaaaaaaaatttttttttttttaagggagagcataatggagctcttgtgatacggtgctcttagtggaagtttggctatcaattccatcacctgtatttcacatattttattaatgaagttcttaaattaaattctcatatttagccaagtattcatttggctgggaggtagaaagcctactaaccaactttttttcatgaacaatatttttaaagtccaagatttttaatacctacattagggaaattctagaattaaattcttacaatgtggactgcatatgaggcttttagtgacagggaatttgttgaaggctatctgtgggttgtattttggtataacatttcctaattttatttgtggtatgttcatttgatatcatttggtaatacctgaaaacaggaactgattttactgtgttgctttttcatcatttctagctgaaatgyacagagacctggagccttaacagtctggttaaacacctcttaggtaaacagctcctgaaagacaagtctatccgctgtagcaattggagtaaatttcctctcactgaggaccagaaactgtatgcagccactgatgcttatgtacgtgcttaaagatctttagaaattgtgatgtgttttaaaaacattattataaatgactttagaaaaattttattatagtagtggcagaaactctaccaaaatattttatatcaatttggcattgaaaaatgcttaggaagacatttagtgaaactattcattttcgatattaattagcaagtaccaatcaacagattgttcaatgctagtttattttcattgtcatgaagccaaattaatgtctaatttgtatgttaaaaaatgtgaacttgctgaaaacatgaaaggctaataaatccaggctgagcaagcataaatagtactgatgatggatttgatatataaacaattcagaatgaaaataattatagtacagtttctattttaaaactggccttatttcttatatataaaatgtggtgaaattttagaaaaattgcctccaaatttagcttgttgctgccattagatatatttttatatttacatgtttgtatgtagtgaaatctgggcttatctttatatatagcactattgtgtgttttttaagaaatgtattttattccacagtgaatttgttttctcctaactcatgctttcatttgtagatgaatattttattgtttctcctttgcatctatcaaaggaatggaaactcctttgaattgtaaccagcaaacaattcacttttgttagggaaattggatgataattttcctttaaaagataccgccaaacttgagactaacattctcagctgatttaagtaggatttctcttactagattgcattttgttagattccattttaagttattttatttggatattgtgtgtaatattgagtgtgaaaaagtgaaaacaaacttttaaggctcaggcacctttctcaattttcacaattggtatgattattaaatgaggacatattgatatttgtgtcacataataggttgaattccatgtttgggtgctttgtgaatcattctcttcgatttttctgaagatgggacttactgttttatttcggtgatctttagcatacttttwaaatttttctgtttttttataggctggttttattatttaccgaaatttagagattttggatgatactgtgcaaaggtttgctataaataaaggtatgttaagatccataaataaaatgtgaattcactcttttgtgaggtttatctccaaaaaaggcaatattcayatatttgcaaagcatttagtactataacttcttgaatgtctgagcrgtcctgrcattagggtgggatccatcagggcccaagatgagtgtttcatctttgttacttgtggcaaagcagcccttacttcttttactttgtagcattgctatgtatttggcttctagagttggggctttgtggctttcttattgcagtgacacaaccagctttctcctagtctggagrttatacatccttgctataagtatttaaaatgctttctatataatgctttaaaacatgtaagatggcttatccccaagatggtagctaataaacactaagtgataaagtaggtaaagatctatttattcatttattaaatattgttggtcattttacagtgctttctaacatactgatttacatttctaattttcttctgtcatttttctccaaaaataatggtcatgtcatccaacctcagtgctgtttttagaggtcttgataagccagtgagagcagaaggagccacgtagtagagtgggtgagcccaggctttttgttgcacagaccaatgtgaatcccagccatgtgacctgggatgtacctgtttctccaaacatggaatgtagatactagcataatgtccgttttaccgttttatagaataattgtgaagacttaaagggacaaactattcgaagcatctgtattgatataaagttatcactattctcgtagcttccttttggagattttaaatgattgtgtttgttaagatgttaattaaattaggccattttgctaaatgctcttaaaaatatggcatgactgcctcatataaaatgatatgatattctttataattgtcgttgagcctctgtgggtggcaggccctcctttatatgttaaggtagaagagtctttattcttacttctcctccctggagagccacttcctatgaatgcctgctggttctctgtagtcagaggtcttgtggctgtaacttagagtcagtctccatatccctgggttctgcatctgtggattcaaccaaccacagattgagaacattcaagccaaaaaaaaaaattcacagttttaaaaaaggaaaagttgaatttcttgcatggagtaccacattgaatctatatgaatgaagtgatgcgtaggcattttataaggtattataagaaatccggagatgatttaaagtatacaggacaatgtgtatagattatatgcaaatattgcagcattttatataagagacttgatcatctatggatttgatatcagtgggagggaggttcctggaaccaatccctcaaggatacagaggaatgactgtatgttaattaactgaggcaggtgatcggttttttaagctgattagggaaacagtatataagaacttacttaactcataataaaactaaaattcaacaggggagagttatgattttttggctttatggttgtggaattgcatgtaggttacatgtacaattttgttacatgtgcaattttgatgaaaatgcttccaaggaatgtttatgatatttttcactaaagtaacatatattaataacacagtactggaagtcctggtatctgtgtacttgtcattgtaatgctacattatttgaccttcactttttttcccctttattacattatatgtgtgagtatattgtgacatcttgactcagattccagtgaattgtattaggttggtgcaaaaataattgtggttttggtaatttttaatggcaaaaaccacaattacttttgcaccaacctaataactaagattaccatctttttttccttccttcctcccttccttcctttctgttattcagccagaagtatcagcatcactgttctcttattttcttcatgtacatatggatgatattttcgaatgaccacttttctcttttgctttttattattagactgtttttttcttcttgttaaaggataaaargattagaacataaaaggatatttacacattgtttccccattgacttattcccaagatggtagctaataaacaccaaatgatatagtagttaaagatacattgactcatttattaaatattgttgagcattttacgatatgggaataccgtagtgaacaagccaggcatactctgtttcctgaggggcctacagttttattggggatatagatgagtgaagaaagcaattgcagtgtagggagatgagtcttaygtcatgggaaaacaaggtgctgtagttgacacaccgagaggcatctgacacattgggggaaatattctagaatatttcctggagaaagtgcaggtaaaagccagacctgaaacctgagcaagagttagctaaggccaggtgcagtggctcacgcctgtaatcctagcactttgggaggccgaggtgggtggatcacctgaggtcaggagtttgagaccagcctggccaaaatggtgaaacaccatctctactaaaaatacaaaaaattagctgagtgtggtgacgggcacctgtaatcccagcttcttggraggctgaggcaggagaatcgctttaatctgggaggtggaggttgtagtgagctgagattgcaccattgcactccagcctgcacaagagcgagactctgtctcagaaaaaaaaaaaaaaaaaagttagctagctgaagagtataggaaagaatgggtacaggaaattacaggtgccaagttacagaggtgagagaaattatggtatctataggtaattgaaagtaattcagtatagtgaacattgaatagggctgggcggatgaaggcaaagcagaaaaaggaaagcagawgggccatggtaaggagtttatatctcctcccaagagcaatcgaagtgactgagagttttaaacacagcagtgaagtgaattacattaaaaaaataagaacttgggctctagaataaaaaacggatataggaggaaggcaggagtcacagtaggaatatcttttgggaggctgtgacaataatccaagtgagaagtaatggcaacttgagtcggttaattgtgttgagaatggagagaagttgacaggttcaaaattcatttttcttctttttttgagtctcactctgtcacccaggctggagtgcagtgatgcgatcttggcttaccgcagcttccacctcctgggttcaagtgattatcctgcctcagcctcctgagtaactgggattacaggtgcctgccaccacgcccagctaatttttgtgtgtttagtggagatgtggtttcgccatgttggccaggctggtctcgaactcctggtctcaagtcttccgcccacctcakcctcccaaagtgctagaattataggcatgagctaccacacctgacctcaaaatacatttaatagagcaagcatgagccactatgcccagcctcaaaatacatttaataaaccaatggaatttgaggtaatgatgaaagacacatgtcaaggatcattcctgtgttgttggcataagcaacagggatgaaaagcattgaggaagagcaagattttgggatgcgttgtcacacagttgattttaggtatgttaagggagggagacctgtaagacagcaaagtggaggtggtgcaagaattagttgtgttggctgtagcacagaggacagtttgagttaagagagttgggactgagaatcccgaggaactcttagtgttgaacatttgcgtggaggaggggacaccaaaggagttgccatagacatcgaggaaattaggaggtgtggtgtgcagaaagccaagtgaagaacatgttttaagtaggaggatgctatcaactgttttaaattctgctgagagtttgagaaactgaggacttagaattcatcattagatttggcaatgcgccaatcatttgtaatcttttaaacaatagttttgctgtactgggtagcaaaagagtgatttgaggagtggtcatttggagcatatgctattcaaacagagaagagtccacgggctttggtaacatgaaggtcctataaccatagcaagagaatgaggtgggtggaagtcatattaacgtgaatagaggagtaggttagatctgaggaatgtgggaacagagacagggtctcattatgttgcccagcctggctcagactcgtggcctcaagcgatcctcctgcctcagcctcctgaatacctcgggtttcaggcctctgcatctggcttgaaaacaacattttctcagaagcttgttttagttgttttagaaataacgaaggcatgtgtaaacaactgttctagaagcttagtttggaaagggaacgtttattgatgcatataacacttatatgttgggtgcttatgtgtcaggcactgttagagttgctcgggaaaatttacaaaccaagcaaaccatgccccttcatttcctttgggtgaagtgagggagccatgtggttatctgaaggaagagcttagcaggattagagggaagaaagtgcaaagcctcctagggtgattggctggctcttttggaggaacagtacctataactgaatgaaatgagtgagggtaagagtggcaggaaatgaggctagaaaaggagcttgggccatatcacgtagggcctcgtaggctgtgaatctgacttcatttcttattaatgaaaataaatacgatgatgggtgatgggaaacccatagaggatttggagcagaagaatgatataattaaaattttattttagaaatatttttctggttgtcgtaagaggaaaaatatttagccccagggcattttggcagagagttaggaggctattgtaacagcccaagcaatagacaataattgtttggattaggcgggtagcaatagaggtgatgagaagtcgtagcttctgtaggtatttggaagatatatattgtgaaggatttgctgatgaattccctgtaaggggtgagatgtaaagattcatagaacattaagatattttggtcagatcatctgatcaatggaaaggtcagttatagtggacagattatgagaagaacaggtttgggtgagaaaactttagatttcagtgttggatatcctaagttttagatgattattgatatccaagagatatcaatatttgggatcaatttgggaaatatgatcccaaagttcaaggttgaggttggagatgtaattcagatccgatggtagttaaagcagtgagactgaatgagataaaatagggagtgaatgaaataaagagtaggtgtgatattgacctcaagggcacaccagcatttagaggttgggaagatgaggagagagcagcaaagaggactgggagggccactaatgaaggagggaagtacaggaggtgtttagttctgaagccacctgaagaaaatgtttggaataggaagaagttgtcagttgctttaaatcattcggggaggttgagtgagatgagagtctagaactaacagttaggtttgatggtgtggaggccatcagtaaccttttctttcttttttttttttgagacagagtcttgctcagtcacccaggctggagtgcagtggcgcgatctctgctcactgcaagctccgcctcccaggttcacactattctcctgcctcagcctccggagtagctgggactacgggtgcccgccaccatgcccggctaatttttttttttttttgtatttttagtagagacggggtttcaccatgttagccaggttggtctcgatctcctgacctcgtgatccacccgcctcggcctcccaaagtgctgggattacaggtgtgagccaccgcgccyggcccaagagtaaccttttcaaaagcagctttgctctactgatttgggtaaaagcttagttgcagttggtttgggaggaaatgggagcagaaaatttgagagagtgagtgtagacaactctttcaaggaatttcgctataaatgggagtagagatctgaagactgaataattagcaaactgaaaagtgggaagacgtaattctcttattatttcatttttcttagtgaaataagaggtgaagttctctgagtaataggagggtcaaacaggtgttagaagttcacaaagaaaggaagaggtttgaaatagtcattttgagagtgggaaatgtagaagaattaacagtcattgctgagggtgcgtttgaaatctgtcatgagtttaaaataacttgtgtcatcatcgatgtgtttattttcaactatattcaactgcttgggtgtaggcatcaggtaggtaaaaaaagtgggttttattatgagtagaggttttgccacgtaattaccatggagggagggaagagcaaaggagttgagagtatagatacaaaggaatgattactgtaatgtgggtaagagaggaatggaaggctcagtgggcagtgggagtagggatgttgataggtaaggaaaaggtgataggatcaatgcatttggttctgcaagtgtcaaagtattgttggggaaagcatgctggaaggaaagatagggatgctggtgttctcagggtggaaggcttacagttgtagtctggaagtggtgattttattggcaattataaggtcaacggtatgactatggaattgagtggctaaggtctgttgaagaaaagattgtcggaaatgcaggggtcaaggaactggcctgtggatgttgaastcactggcastgatcaaggaatagtagtggagtgaaagtagttaatgaatcaggcactaagatctccaagggatgaaaggatgcagtttggagatgacaagataactgtagtaatcaggaatagcaggttttgtagctctgtctcataggcctcagaggagatgggcttttgaaggacaagagaaatgatgatgaataaattctaagcaggggaagtgtttgggaaagcagggcaggctttgtgctgttgatggcaaatgatgtaccagacaggatgaagttgagaatytggaagttgatcactgattagaaaggcttacattttattttggccgggggtggcagctcatgcctgtaatcccagcactttgggaggccaaggtgggcggatcccttaggccagaagttggagaccagcctggccaccattgcgaaacactgtctctactagaaatacaaaaaaaaaaaaaattagctggtcgtggtggcacatgcctgtagtcccagctactccgggggctagggaatgagaatagcttgaagccgggaggtggaggttgcagtgagccgagattgcgccactgcattccagcctgggtgacagagtgagactctgtctcaaaaaaaaaaaaaaggaagggcttacattttattttggwgctgactgggaatgaaggcaatgagggatgactgttggagaaggctgtgcttactaaacagtattattaagtagcagcatacatggtgttatactgacttctgattttgcaatagtacagacaggttcagattctcatttccaccttctccttcygcctaggtgaataactgctgggttatagtacagatgactgcagatcatttggaatttactttaaatgtaaacagtaaaaatttgaaagagagggaaagtgattgaggcaatttggggattgaataagaaggtctttttgttggaattcatttaaggaaagaaaatgaaaatttgatccctaatattatttaatgaagtggctaaatgaatatctctgctttgtggtttgaaaattaatattgattttttttccccctagaggaagaaatcctacttagcgacatgaacaaacagttgacttcaatctctgaggaagtgatggatctggctaagcatcttcctcatgctttcagtaaattggaaaacccacggaggttaaatattaccttttttttttttaacttaaatcaattctgtttatttttttatyacattttcctatatgtgaagaatactattcattaaggctgactcatagaaatttgcttgaatacacacacacagactgatgcataaatttgagaaatatctttccagttgttgaatagtgaatccaaaggtttaagccttttctgtctgctttgtaggatgttttatgaaacaaaggaatagaaattgtattcatattatacattttgaaattatatctatattatattttttgtcaaagcaaaataaattatacattaaggaaaatatttaagattcaaagttgtcattttctttctgttaatgagtatctttgatttaataacatttatagtttggtcacttgaaatctatagtgaccaaaagcaatgtcatatttagtagcctcatttctgttactatctgattattacttaagaattctacttaattaatagattattagaacaaaaggcattccaattttagagattcttttatggttaaagcactaggtaacttaaaaaatttggatcaaatgttatacagattaatagaccttggaatacaggggctatgtctttttggaatcagaccttgtcctggccttaattgcaggatgacttccttattaaatctctaaaagcaggaatgctctggaacaatgaacaattagaatgtggtaatgtaattttgggccaaaaaatactttgtagaaatgtgrwtctcttacttggaatagaaagaattctgactcgaaaaagtgcagttaatgtatgcttttctgggtaagatttgtgatagattttgattgagatttaaaaccatgatatataaatttagcttttttgtcaaagtaatttgccaccctagaatttgtgttggtaatttttaatgcaacttggacaatttctgaaagatgtaactttcttttttttgagacgagtctcgctttgttgcccaggctggagkgcagtgacatgatctcaggtcactgcaagctccgcctcccgggttcacaccattatcctgcctcagcctcccgagtagctgggactaccggcgcccgccaccccacctggctaatttttttttttatttttagtagagacggggtttcaccgtgttagccaggatcgtctcgatctccggacctcgtgatctgcccgcctcagcctcccaaagtgctgggattacaggcgttagccaccgcgcccagcctgaaagatgaactttaaaatggggaaggatactagtaaagccatttcttactcatgtatacattttyccctccatgaaattaragcagccaccttttacatgacttttacatgcatttcaratttttgtactarcaattaaaatatctactggatgtaaatcacatgtgcttaatgctttgcttcataatatctgttgaagtcaattaaaatataragacagatctttaaattgaacatgttttatttgggaagcaagaattaaatttgaggcatatacacagactgggtgtccttggtatctctgaagaacaaagrgaaktttggaggttatagaaaaaggaaaatgtgacattgtttttccagaaagttctttggcactagtaaattttggggagttggaagctctgatgggttagtgactgtggtgggtaaaactagtcttagagtcacaacaggttgtttcagtatctattagataaaacaggttttaggttacaataggcagtttcagcagctaggcttgcagaaaattacattcttagagtaatgttatgtgccttgagtgcttttttccccttggcccttgactctgatttagttgggtatgacaagaattatcaatttatataattactttttacatattgaagctgaataggttttcttaaaacttggaaatgggaaatactgggtcttgtgaagttttagtgtgaaaacgataactagtctcttatttcatgctctttgtaacaagtctacagtaatacctaatgtatctagatgacacctcagaaccaggagggaacaaaaaagacctctgagcagtcaaaataatgctataagcatgtattccagcttactttcggcatttctgtggagtgcaggaggccacattttgttcatagatccagtttgacaagcttgggtactgagttaaagtgaaaatggtgtaaataagtaatcatattcacatgacagtaggtggaagtgacagctgacaatctgaaagagtggacaaaactataaaaattagaactaagaactcttaaaatagaacggtttgaagtttgttacagaagggagcagctttatgcttcagtggactctgaaggtattggcagtgtatagtactgcttagtcattgatttaaattcggtatatatctcttctattgctgtcatgtacttgacattctgctgggtgctaaggctgtctgcaggctactaatatgcataataacaatcctgaaaaagaaggaaaagtatactgtgccttactgaagaaggcaggacagcckttggtatttgttagagtaaatattagttatcttacataaagcatgttatattccctgatgtcagggcctgataaatgagcccttacactcttgatagtcaatctgtgccactgttgctgtgtttgtatgttacaccatttcctgtccatgtaacagttaaactgtatcacatatctgttcctactaaactatttgcatataattttaacatttgagtggctgtatataaagctaaaagttctttataagatttatagcatcttagaatgtttaaattagrtaacattagtgtgcttttagtttttgaatttaattttgctcttgattttgtttgtgttaatgtagactttgtctacgtaagcttgagcccaactttggagtggtgttttcagtgatggaagtaactggaaataactcatgaaaccacttagtacttttgatagtttattcccatgaaggatcaaatttttacttgagtcattaatataaaaatttaaaagacatgtcagattttattaagcatggattttaaatatataaatattagaagacctaaacaaaatcgctaatgaaagagtaaaacatgtccctgcctatcatactcccttcactttcactgatttctgcttttatgaagtactttaataagctctacaacaaataaacaagacattgtgcctcattttacactctagcagtggttttccattccaactaactagattgggtttataatatagtcatttaaacttacttagttaaaatgttatacattagcaactgcaattaaggagctaagaaattcagctcgtatttatttatatgcatcttatccatagtttctcacttgttatatttgcctactgatggcaaattgattttttctgttccaaaaatgtagtgttttgagatttttggagatgcaaaacagcatcattttcaaattagatcacaaacaatcttacttgttgcagttgagactagtaattgatcagtgaggtgaaaaaattaggcaaaacggtatcatcaaaattttctttctttttttttttgaaacagagtattgctcttgtcgcccaggctggagtgcaatggcacgatctcagctcagctcactggggcccctacctacgggattcaagggattctcctgcctcagcctcctgagtagctgagattacaggcgcatgccaccaagcccagctaatttttgtatttttagtagagacagggttttgccatgttggccaggctggtctggaacttcagacctcaagtgattcacctgcctcagcctcccaaagtgctgggattacaggcatgaaccaccgtgcccgccccaaattttcttttaacttaaagtgttaatgtttgtttgttcccaatatttttatatatgtcaaggctttttcattatatacaggccagctcttkggagttctgcatagtgtttcttgtttaaaccacacctataatgtaccatctacaatttccaattctttaagacagagtgaaaaattaagacacctgaagcaatctgagtgcggagtcctaggcattatgattttccttgacacttttagggttcttttatcacagtttatcaaacaccttttttttttttaacaaaaaacaaatttacaaaatctttccatgtattcaacttagaatttaatgaaatagggtttttttttttttggtggtcatgtatcatcaactttctttacatttaattaaattaatcaacaaaaaacatatagttgacataaacaaatttgggaccaagcactactgactcttagtaaacatacaagtcaactgttggtgcagaagtgccttgatgctagagagtagcctgcaagctgtaattatatatgggcattagggaatgaagaacagccttaatactattgatcttttaagtgaaggtcascttagaaagcttttacttgttaaaaagcttcacagtttgtccttgtagttaatgcaattgaagttgaattaatctttcttaattttttttttagggtttctatcttactaaaggatatttcagaaaatctatattcactgaggaggatgataattgggtctactaacattgagactgaactgaggcccagcaataatttaaacttattatcctttgaagattcaactactgggggagtacaacagaaacaaattagagaacatgaagttttaattcacgttgaagatgaaacatgggacccaacacttgatcatttagctaaacatgatggagaagatgtacttggaaataaagtggaacgaaaagaagatggatttgaagatggagtagaagacaacaaattgaaagaraatatrgaaagagcttgtttgatgtcgttagatattacagaacatgaactccaaattttggaacagcagtctcaggaagaatatcttagtgatattgcttataaatctactgaggtactaaataaagaggaagcacatttttagttattagtaggttctggcagactttattcccgtaaagagacagatagtaaatattttaggctttgtgggacatacagtctctgttgcagtaactcagttctgttattgtagtgtgaaagcagccacagacaaatgtaaacaaatgtgcctgtctttcaataaaactttatctasaaatacagatagtgggccacatttggcttgcgagctgtagtttgctgttcctgacttagtatgatatgcagcattgtgtagtggaaagattttatagtatcaacagacatttgtaggagtttgctattttataatttcgtatgcttttttcataatagatgtctctgctttttgtggattctcttcatatctactagtgtttactcttctgactttgatttttgggggtgtattttatttctttatacagaatttttttcttttttctttctttttttgagacaaggttttgctgtgtcaccccagctggagtgcagtggtgggatcttggccccctgcggtcttcaactcctgggcttaagcgatcctgtcacctcagcctccctagtagctgggaccacaggcctgcaccactacactcagctaatttttgtattttttgtagagatggggtttcgctctgttgcccagactggtctccaactcctggactcaagtgatccacctgccttggcctcccaaagtgttggaattataggtgtgagtcactgtgcctggcccagaatttctttacttgctcatgtgagagagtttctaataaactcctgatgcttttgcttgacactatagttttactgtcatctcagagtcagattttttccttaatttcttcattaaattgatttcttaatttctcatttgttttgcattagtttacaaaattacttaagatgcctatattctctgaaattttatattttatttcacgataaataagtttaaaaaattagatttgaccatttaattagagttatttccccatcatttttctaatggcaacaataattttagcatttgagcaattctctgtattttggtaactattagtaatcacttttatcagtataaacatgcatttcattttaaaatggttttcaaaatattctcataccaaccattcataaaagatgttccccttctgggaaatatcagtttttgctaacatctgcatttccctttgattttctaggaatttcttattaggtatacactttaagtgatatgtttcatataatattataggattatcaggatttcatgattttttttttttgagatggaatctatctctgtcgcccaagctggagtgccgtggcgcagtcttggctcactacaacctctgcctccccggttcaagtgattctcctacctcagcctcccgagtcactgggattacaggtgcccgccaccacacccggctaatttttgtatttttagtagagaaagtgctgggattacaggtgtgagccactgcacctggccttggatttcgtgatttgactgacatcttttacaccaattattgccatttttttattgggtactaattattagtattgctttctttattygttaaataagaagtaaaagaacttttaaaaaataaaataactttttttcctagtacaaagcttattttcaattttttttattgcttaaattttgcaggttaattaaggctgtacttctttttcctacttcctgtttaaatatttggcattttttgagggttttctttctatggatttttgtgggggatcccatctcgttggacacttggttcctggagattgccaaattattgaaaagtttcctcatacccaaacattggcaatagactgaataaataacatctctgacattatttttcaattatatagagaatgctttttgtaaaatactgatttatttaaagatattacartcatagtagttttttgcaatctttttwaaatcagtggatgtcaaggaacaactattgttctttgtacrgcatttttcaacattgtgaagagttcttatactcaaaaagtttgggagacacagtktgayattgtttaacctgagttgaacttgtcattttgtattcttgtttagagcagggattttattttgtctctttatctaactttgtattcctaactatttctttctttctctttggttctttgtttctttgttcattcttctctctctcccttttttatctatcatataaatatgtaaatatatattatatatccattagggaagaggaagytgtctaaagatatctagtatataggagctttgttctgcagaaaagaggatatgaagtcaattatattggaaattaatgcttaatacttttttttaaagcatttatctcccaatgataatgaaaacgatacgtcctatgtaattgagagtgatgaagatttagaaatggagatgcttaaggtatgtttacaattataaaaayattacttcaagttctttccaaaggacatttaattaagtaaaatattaactaattctaaacyaggttccaccacaatgaaattgctactaattatgtaacattagatttcacattttccaattcatgtttcttttatgtagtctatgaataatgggttagaggtaatatactaattttaattgtgctttctttgttccttcttttttttttttttattttgagacagggtctcactctgtcacccaggctggggtgtagtggtgccatcttggctcactgcaaccttcacctccagggctsaagtgattctcctgcatgagcctcctgagtagctgggattacaggcgtgtgccaccatacccggcttatttttgtattttttgtagagatggggtttcaccatgttgcccaggatggtcttaaactcctgggctcaagtgatctactggcctcagcctcccagcgtgctggggattgcaggtgtgagccgccgcatccagccctgtgttccttcttgtgttactttcttgtaattttttcctggaatatgggtagtgatttggctctccagtattgaaattgagtttcctttcttccaattcatgtgtatccatttttatttggaagttttgtttttatacattcaataatcatctttactttctttggtattatttactatggatattttatattatataattttcaaatggattaaatggttcagttttactcttattattgagattgaaaatactagtttataatttatatattttctattcctttacctctaatttctttgtcaggtgttactaaccaaagatgtataataagaaaagccaatgtagctaaattaagtaaaaaatgaagaaaaacacagaagttccccattatgcatttttttattcctaatctttaggttgatgagatttttttatttttatgaaatgagattaatttattgacttttttagttttgaggccaagtaatgagtagtgagtaagaatgtatattctagggccaggcatggtggctcactcatgtaatctcagcactttgggaggccgaggcaggaggatcacttcattccaggagtttgagaccaacctgggcaacatggcaaaaccctctctctccagaaaaatacaagaattggctgggtgtggtggcatgtgcctttagtcccagctacttgggaggctgaggtgggaggatcacctggggagcctggggaggttgaggctgcagttagccatgaccatgccactgcactctagcctgggtgacagagtgagaccctgtctcaattaaaaaattaaaaaaaaaaaagtagattgtgaattcagatgtaggtttgtatcccagcttttccagttagtatctgtgtgactttggggaagtttcttagcatctttgatactcggttaacagttgtaattattatttaaggtattgcttgagaagagcttagtatagagcctgacatttagtaagtgtttaatacatattagctaacagtaaaactagaacataaatactgaattgtattttgttattaattatccatttctctgagaagtactgttccaatagtacatttataggaaacttgtggacgtctacaaacgtatacattaaatctcttagaaggcaacctggatgcccatattagagaactctattttaaacatgcattctaagtatgtttgtggacttgaataaaataaaacaaacagaaacacttctttcttctgccttcaggcttgaaatgaacatacttttttttaaaaaaaaaccttcaaaatgaaaatattaaataaaagatttaataaaaagagaaagtaaaaactgtagtttaataaagtcttcctgtctcttcatagttaaaaaatgttatagatgaaacaattttgaaatattcttgaaatagataatctttatttaggggagaatgtcagatactgtcaagccaaaataaaaacaaataactttatttcatgtttgtaaaattccttttctaaaatgatttgaatcttttgttgttttgacaattccaaaacacatttattgtttgctcatagtttcagccttattcagaaagaatgcgactgacacatgatatagagaaacttgttccaaaaataacattaaaatccacgtttactacttgagaatcgaaaatattgaggtgcaataaagaataaaatgttttaaattatccaaatttaaaatttatgatagctttccccaggggcagtttattatatgctattaatgagccttgtttatgctggaaatgttccatctttggccttgcgccttagaaaccattcatgagcacatatttaaaccggagcacacatgttcttttgtagtatggcttgcacatctgccagctttcgacaaaattgtaggccctgttaataatagtccttttgtgtttggtgaaaaagatacgacactgtcagtggttttgcttttaagatttcttttaaactttcagtctttagaaaacctcaatagtggcacggtagaaccaactcattctaaatgcttaaaaatggaaagaaatctgggtcttcctactaaagaagaagaagaagatgatgaaaatgaagctaatgaaggggaagaagatgatgataagggtaagcactgaagtatgtttgaaatgactcacctgtgatacctaccactgactttaacttaggatccagttttggatggtttggaggtcagggactttgtggcatatagttaattattggatccttataagcttttgtctccttagtgcttttgtctccataaagcacaatcttactacttagaaaaatagagtaatagcattatgatgataaaaatatctttccctttgtttttttgtatttctccaaatcattatagctctcatttagaattattaaagctgagaactctaacaatgaacttttattgtttagtggttaattatcttgattctttgttttgccctttcttggccactcaggaatctttcaagctcactgtggacagggaaagtgacttgggtagagctaacataacttcattgtgctgtgcagttagaattttgaccaaagatgtgggtaactaacttttcctaactaaatgacatttaggtaactaaactaaacgagattttcgtaactaaattttggtgtaactacatttagctttaggtaactaaaacgaagattttattttatctgtggatttttttagtgcgggactaatgtaatttctgattaccattaattgaaggttggttatattataacatttggattggtatattgcttgccatggtttgttctaaatgttagcctttagaagtattcctgattctaaaacatcagttttttttaatagtcctggcaaagtgtgaatcacaacaaaattctaatacttaaaagtaatccaagtgtcacagatggtacccagaagaccagtttgtattggaattaaaaaatagaaaacattaacccatggtagctgtcactgtattctttcaaagaagccaatgaaataaactgttttctccctctatgkggtgtttttctacttgaacataaatgcacattttattttatttcmagactttttgtggccagcacccaatgaagagcaagttacttgcctcaagatgtactttggccattccagttttaaaccgtgagtataatctcatttaatcaaatcacatatttagtattctctttaaaacaagggaaaaggcaaataacctgtctgcttaacagcaacagcacaacttcactatagttatacatgccacackgtattttctgtgtgactacaaaattatttcaaagtgatatttatataaaattcatttctgcaaattgtttttataagtgaggaaaaatggttttcctttaactgagcagttctgagtagaaactagtttaaagatacttataaataaatgttaatttaatactgacttgtttttcattaaacgagtgtctatgtgcctgttttgtgtatattacccagaacatgcagatgtactagaagttcttaatacaacaatttgaggaatagtgataatcttatctattttaatgtactcaaaatttgtttacatctaacaggcacatttttgtgaggattaaatgagatgaataagaatgagatgaacaagtaaatgtgaataaaactaataagcctgtgaaaatctagactggatttttcctattctgagaatttaaaatataatccactgaagtatttctttccttttttcttttgatcttaaacattttttatttatgtcttacatacagaaaagtgcacatgttgtagagatcaatgaattgtcataaactgggcaccctgtggccagcacttagttaagaataggtcagtaacagcatgccagaagaccacctctccaattgatttttcccatgatattttattaagaaaattttctaagatgtagtaaagttgaaagaacttttttctgtgcatgtctgtattcccaccacctaaattcaactatcattactatacttgctttatcacatatccatccattcatatgtctctatccatccattcattcattccagttttaaaatgcatctcagggtcaatcgaggacaccattacacttccacctaagtatttcagcatgtaaattattaacgagttaaatatttacttaacagttttttctttggtgtaaaatttgcacgtaaggaaatataaaactttaagtgtacatttgcaaattttaaatatacatgtgcatacccatgtaacccaaattcttatcaagagatattattatcatcaccacacagagttcccttatttcccttttcagtcagtccttgtccctgagcatttctcttattattttaaagtattgattcttttggatatctagtatgaagcttagaatctgttttttactttagatgtatgtagtgaaatttaatatatataccaaatggtagttgttagttagcttgaatgggacattggtcaaatggcattgtttgttttaaagttccaggtttgtgcatttatgtatgaagtttgaaaataaattctatgagaggaaatgaaaaattgaatggattttaatttgtaccttgggtttcttattaataaaacaaaatagctttttgcttttcaccttcaagagttcagtggaaagtgattcattcagtattagaagaaagaagagataatgttgctgtcatggcaactggtaagttgtacttaagcaaaaccwaatcctttaaaaaaataaaacataaagagtttgaaatgcttaatctttcattaaactctcaaaatacaaatgcarctacaaatgatgtaaamtatagaagagagtgaacaaagaacagatgctcagatttatgtatcaattagcttttaggaagatagcatactagtattgaccattcatctgtataagtacattgtaaaaagaaatgaaagcatcaaaggtttatttttatttctatatttttttcattttatttttatatttttttcatttcaaggatatggaaagagtttgtgcttccagtatccacctgtttatgtaggcaagattggccttgttatctctccccttatttctctgatggaagaccaagtgctacagcttaagtaagtcatgttatcattgccacamtatcaccctctttttttcttctgtgggtgaaacatctgatccatcatgcatgttaaaatctagttcacaataacacatttctgcaggtattgctttatctttattggtaataaatgaccctttagtggaagagcttaccttctttcttgtgttctctgtaattcaaagctaccaggtggccctgataaaatttttttaaaaaacattattactttatgctggtttacattgaatatctcaaaattcttttctctttttgttacccttgctttttagcttgataagaagtgtatacatggaagtatattttttatctatgaaacacttttcagcttcttcaacctgagcttgcaatctgttttaaattgatacataatatctttacatattcatggggtactgtagtattttgatacactcatatcaaatacacttgatcaaatcagggcatttgttcatcaacttgaacatttatcatttctttgtgctgggaacatttctaatcttttctttgagttattttgaaatacacagtgttgttgttaactatagttaccctactgttggttaatgagtacaaacatacagttagaaggaataggttctagcaacctattcctttaccccctgtcatcccctgctgccctgagcttgcagtctctttcaaagacccaccttaaaaacttgcattctgataaggcccttgaaggaatttgcttatcaagttagtaagtgacaaaaaagaaaattgcaaagaacaggaatataaattattatatttctttattctttctcacttaagagtgaaattgatatgtgtaatgtgtacatggtgccagaatatttgtttttcttcttatagaatgtccaacatcccagcttgcttccttggatcagcacagtcagaaaatgttctaacagatattaaattgtgagtaatttttttccctcaacttttattttggatttatgggggtgcatatgcaagtttgttaygtgggtgaattacatgttgctgaggaagttgtgagtaatttatgtcatttctaatcatgtggtcagatgtctgtggtatatgagagaattttgtatacaaacaaattttactaaatgcatgaaaaaaaaagtccatgattttaaaatgcactttcttttgtacctttgcaggactgttactttttaaatccttcaaacttgaagaaatctgttattctcggttcttgggctataagattagcattgtactcatagaattataaaaattttggttttggaagagaagttggagaatataaagatttgtctcattttatagatgagaaaactgaggctcagagacaagtaatttgcccaaaatcacacaatgactggctgagcagggactggattctaggtctcttgcccaaccaattctatcatgatgtaattcctaaggagaatgtcatctcagatacacatacacacacccattttgtgtgtgtgtgtgtgtgtgtatatgtacacacacacacaaacatatgtacacttatatatacatacacacacatatattaatatatatgcatatatatgcatgttctaattcagaacattttcatcactcccaaaagaacacccctgcccattaagcagttgctttctttacgtatatattagtatatacatacacacgagatacacatatatttactgagttttgataaatgcatacaaagatgtaaaccaaacctctaacaagatacagaatatcactgacactctagaaagtttcttcatgtccctccccagtctgtccttccatcctccatcctaggcaagccactgctccgattttctctaccatagtttggtagaatgccatataaatgcagtcacacaatattaactcttttgtgtaagacttctttcatttgctgtaatgtttctgagattctttcatgctgttgcatgtatcagtagttttttgttttgttttgttttgtttttgttttttcagagtcagggtctccttctgtcayccaggctagagtacagtggcgcaatcatagcttactgcagcctctaactactgggctcaagctatcctcctgcctctcaagtaggctaggctgcaggtatgttccaccatgcctggctaattattaaattttttgtagagacaggatcttgcttggttgcccaggctggtcttgaactcctggcgtcaggattgtttccagttttggattattacaaataaagctgagacacatataagtctttgtatggacatatggtttcattttattgatacatgtcaaggagtgggatgactggatcgtgtggtggatatatgtttaactttcttttttctgagataaaattagaaggcgatcctcctgccttggctttccaaagtgccgggattacaggcgtgaaccaccgcacctgatgcagttgttgttgttgttgttgttttaatatctgrttattattttattgtatttcattgaatatagcacagtttgtttttacattttcttattgatagacacctaggctatttttctggttttggactgttactaataaagctgctatacacatccttataaaaatcttttttgtgaacatgttttctttttttctaagcattttaaatcacctttattgaggtgtaattgacttacaataaattttatatgctgagaatgtataatttgataagttttgacacaggtatgcactcatgaaaccatcatcacaatccagataatgaacatattcatcacccacaaagtttacctttttgttttaaccccagtcaccgggtaactgctgagctccttcctgttactgtagactagtttgcattttctaaacttatatacatggagtcattcatattttatgtgctcttttttgtctgatttaaataatgcagtataattattttgagattcattcatgttattacagtgattaatagttcattcctcttattgttaagtggattacattttatggatatccaacaagttgtttatccattcacctgatagacatttggatcgtttccagttttgggttattacaaataaaactgctatgaacattcgtatgtaagtctttgtatggacatatgttttcattttattatatatgacggagcggaatgactggaacatgtgatgcatatatgtttaactttcttttttctaattgagataaaattcacagaacataacttttaccattttaatcattactaaagtccagtgggttttggtatagtaataatatataaccatcataattaattccagaacattttcctaactcccaaaagaaattccatacccattaaggagtcattccctattttcccttttcttttctttctttttttttttttttgagtcagggtctccctctgtctcccgggctggagtgcacttgcatgatcttggttcactgcatccttgatttcctgggctcaattgatcctcccacctcagtctcctgagtagctgggactgtaggcatatgttaccatacctggctaatttgttttattttgagtggagatgagattttgctatgttgcccaggttgctctcaaactcctgggctcaagtaattgtcccacctcagccttccaaaatgctgggattacaggcgtsagccactctgcccggcctattatctctgttctgcccacttccaaccactaatctactttctgtctctatgatttgcctattctggatgtttctataaattaacttatacattatatggccttttgtgtctggcatcttccacttagcatagtgatatcagtacttcattcggtctttttttatgactgaataatattccatagtatgggcatacacattttaaaaattcattcatcagtgatggacatttgggttgtttcctttttggctgttatgaataatgatgctgtgaacatttgtgtaccaatttttttatgaacatacattttcaacgcttttgcatatatgcctaagagtggaattgctgggctatatgctaattttttaagaaactatgaagcttttgagagtgattgtatcatgggatattcccaccagcagtgtatgagaggtccagttcctccccatccttgctatcacttagtctggctgatctttaacttaagccattctaatagtatctcattgkatttttagtttgcttttccctaatgactaattatattgagcatttttcatacacttattggccatctgtatatcttctttgagggagtatctgytcaaatcttttgcctattttttcttagtgagttttgatagtcatttctatattctgaatataaattatttatttgatatatgctttgcaaacattttctcctagtttatggcttttcatactttccacacagttcttttgaagagcagcagtttttcattttgataaagtccagtttgtcgattcgttcttttagggattttgcttttagtgttttgacccaaggtcacaaagatttgcttttatgttttctcctaaaagttttatagttttaagttttacatttagatttacgattcatttttagtaaatgttgtctattgtatgaggtattgattacagtttatgtatttttcacatattgttccagctccattttttaaaaagactatgcttttacactgaattgactttgtacctttgtcaaaaataaattgactacatatatgtgggtctattgctgcactctctattctgtgttctgtggatctatttgtctgtcttgattggtgtcttgattactgtagctttataataaacctggaaatcaggtagcgcaaggcctcttgctttgctcttttctttcaaagttgttctggctattctatgtcctttgtatttctgtgagcatgtcagcatcaccttttcaacccatatgcctgctgggattttgaatgagtttaccttgaatctagatatcgaaacaattagctgtcttgatagttattgtcaccgttttataccgaagaaactaggcatactaaagtaacttggctaacatcacttaccttgtaagaagtagaactgggctgtttgacatcagagcttattctttataccatttcctatgttaattagaatacaatattaatttcataaaggtaaaggcatatctgttttgttcctatttgattccttgtgaaagcacaatgcctagcgcacaatagacacttaaacttayctgttgaatggacaggtgaatgcttttaaagtctttccatatagaaaattaagtttcattacatttgacttgatctaggttttcatttcatagaatggagagcagactctgtaaatattttgccccagacctagcyttattacaaacattgtcttaattaggattctgtctacccagaatagaaattaactcaagctagcatgagtgtatattgaaatttatattaaggataaaggaatgtctcatagatcccactcaaaagaaattagccagcccttaggaagagactggaattgggtttggaaaatacaataggtctttctttttatctgtagtctttagtgagtcttcctcatttttctctctgaagagataagcattctctgcatatatatagcattcttttagattttcgtgacataaagtattatttaaactttcataaggtatcttgattttaagttgtaattccttgagatgattgttttctttattgttaatatgtttcccttcctgtttttttttttttcttttttcttttgtttgtttttacagaggtaaataccggattgtatacgtaactccagaatactgttcaggtaacatgggcctgctccagcaacttgaggctgatattggtaagtgataaagaaagatctctgtaaatacttactgagttaatatttaaagttaaacctatggatggacactggatttcacttctgttaaagtttatttcaaacattacttcctccaggaaatctctgactctctaacttgctgtttcacctatcttatcccatgatactctataattccttttgctatagaaattaggctctgttatcataattacctgtttatatatctgttttcttctgctaggctataaacttttcaagggaaaaatatcactttttaaaatttatgtttccccagtgcagtgcttggcatataggcacttaaacatattgttgaatgaatgttgaatcctaggttctgtgaaattttaatttacttgtttttcatgttctgtatctaaattaagtcagtgtagtggttttgtaccctctttgttcataagaatcacttttcaaactttaaaaaaaatgtaggtaaccaacacccaactctgaaaattctgatttaacaggcctgggttggcacctggcattggtggtttctcacaggtgattctgatatatagcccgggttggaaaccacagtacctttgattagttgccactagtgagtatgatttattacaaaaaccaaaaacttagataagtcacagtttatttcctagaacgtgtaaatatagaattagtcaaaagctgatagcactttttttgtacttaaaaatattttaagcctcagtatagtgagacctcatctctacaaataattttttaaaaaattggccgagcctggtggtgcatgcccatagtccaagctacttgggaggctgaggtaggaggattgtttgagcctgggagatgaaggctgcggtgagccaagatcatgctactgcactccatcctgggcaacagagcgagaccatgcctcaaaaaaaatttttttttcttcttggtggttaggcttaactatccaagaattgcaatcatggcttctattgcaaatgcccctatttcccaccttcagttggcctaaccaaatttaatttttcaatatcatatgatctttttgtataattatgtattmaaataattccagataggttaggttttcgaattgcaacgtctcatttaatggttactttcatataactgtaggaaagcatttgataatttttccaacaatgtaatgaaaacaaacttgtatcttttttattatgtgttaaaaccaacaaaagaatgagggcagcaattaacatttcattaaatatattagcaatgagtacatttatgagctcttaaactcccttattgacatactgtattttttgcctttaatggacaatgaatttgatatgtttcctaataggttgtatgaagttattgtgaatatttcactttggattaagaataactaccctatatataaatttcatggttgtattgcaaaagctggggtctatgtccatagtggtttgggtacgtttttactatttgctttgtttctgtgatagtgttaaatgaataataagcttaagtatttaagcaaatacttaatacttctgacaagtagttagaactctctatttttgtttttttgtaatggatgagttatggacactgcaattattagagcagcgtactttgcttatgatggatgaaaatgttctctggttgactcagtgttgaataaaaagggatacatgaaataaaaattatttttgaaatattttcctttgccttttgttgcgggaaattgtacaatgcttgcaaaaatgaatatacgcaggatattatttgtacagcagtctgacatttagctaatcagattcctcatttttaggtaaatgttaaattacttaagtagtctggatttttaacagaaacagcaaacatagttttatagggaggctccttaccaaccagacttttaacttaagtgaatgttggcaaaagcttgtctaaactgatttccagggataaggtttagctccattaaaagctagtttgtcaaacctgtaactaaagctttttaaaaaatgaaagttttaaaagagaccatcattctgttttaacctatttaatttaaaatctgggctgaagtaggagtattgcttgaacccaggagttcgagaccagcctgggcaacacagtgagaccccatctctgaaaaaaaaaaatgagctgagcatggtacctgttacagtgctagttatgaaagaaagaaagagagagagagagaaggaaggaagggagaaaggaaggaaggggctgggagtggtggctcacasctgtaatcccagcactytgggaggccgaggcgggtggatcatgaggtcaggagatcgagaccatcctggcgaacatggtgaaaccctgtctctactaaaaatacaaaaagaaaaaattagccgggcatggtggtgggtgcctgtagtcccagctactggggagggtaaggcaggagaatggcatgaacccgggaggcagagcttgcagtgagccgagattgcgccactgcactttagcctaagaaaaggaaggaaggaaggaaggaaggaaggaaggaaawatcagtcactcactcaggtttagtttcaaaagccaaaacagtgataatattgaattttttccagccactcagtagtacccagagaattttgatacaaataactgactttgaccccatgtttagtaggttttttttttgtttgtttgtttgttttttttttttgtctttcttctccacactctcttaggackgttgtagcttgtaatgttagtgaattgtaattgtttatttgcatgtctgtctcctcttttagaattgtgaactcctcaggtcatggattgtattttattagtctttttattcctagaaaagtgtttggataataatagatatttattaaccataataggagtagtagcatttttgtgtgtgtgtgccaggccctattttagcattttatgtgaatgatataatttaatttttagagcatctagaaaatgttaggtaccattattatccacattttacttgtgagaggactgagacttggaaagcttaagtaacttgcttaaggtaatacacatggcagatggtggagccaggttctgcatctgggcagtctgactttagagctttttaatcatcctcctcctagtgtccgaacattattaatgctcagagaagtatcaaagaatgatgatactcattgagggaaaaaattattcttaagtatcaatttgttaattgaggacaaaagcactactgttactactgtgaaaaatctgaaaacattgtcacggatgattttacaataacatccttttctgacatgcattacaacacactattgattccgtttcaatgtttgtgtctggtatgggggcggagtrgagaggctactacaggaagaaagaacaaataacatttcttcttactactttgtgcatcatgtgatttagctcctcccataccattttacattagaaaatgtggctgtcctcctgtgctctagtactggcatttcagaggactctttgcaatatgatatgtgatcaatcatggatggcgatgcagttaatttcagtagaaatttgctgactctttttatctcttttaatagctaatgcatgagataaaattgaaggtattaccaaggagaaatgcaggtggatagttttgraggcaaagtcacagtaagcaattcatctctccaaggaatagtgatgaaagctgagatccaataaatgtcttgtttggattaatacataaatatttccttttaaaattcttaaggcttttattcatatatctcccctctccctatttccaataatgatttttggtgttaatatgatgrtatttatgcttctgtttttataggaaccaaatactttgatttggttatttattctcctttggagatgtagatgagtttattttttcctttcgagctttatcttttcctttatgtgtttttcttttttacaggtatcacgctcattgctgtggatgaggctcactgtatttctgagtgggggcatgattttagggattcattcaggaagttgggctccctaaagacagcactgccaatggtaagctttgccaagtctgatgtccygaaattrcattcttaataaggagagcattcaggattggggagtggtaaagaagctgaagacttcactataaaagagcaaatggataatgtaaaaagagaactatttttttaaaaatgctaaagttggtatataatctattgaggaatataatagaacaaggcttgacaaaccttttctgaaaggaccagataataaatatttcaagctttataggccacatgtagtctgtatcacatattcctctctctgttttttcttttagtaaccctttaaaaatataaagagttacatttttcactggtgggccataacaaaacaggctgtgggccatatttgtccgaatgtcttctcagtgatctttcatccrtatgtccttttactctaggatgctgtgaaatcctggttaccccttcttgtatcacattgaaaacctaaagtttgaactattctatagaaattttattaaagcttttggtattagaatttccctttcttccctaattataaaaaatagcaaattttggccgggcatggtggctcacgcctgtagtcccagcactttgggaggccgaggtgggtggatcacctgaggtcaggagttcgagaccagcctggtcaacatggtgaaaccctgtytytactaaaaatacaacaattagctgggcgtggtggcaggtgcctgtaatsccagctacttgggaggctgaggcaggggaattgcttgaactcgggaggtggaggttgcagtgagccgagattgtgccattccactccagcctgggcaacaagagcgaaactytgtytcaaaaaaaaaaaaaaaaaaaaaaaaagtgaatttttacatgaatattctacatgattggcatatttacatgaatggtttaaaaacccacaataatagcactgttttattttttattttgaaaattgtagattcacaagaagttgtaaaaaaaaaaatacctatatagaggtcctatgtacctttcatccagtttcctgaacagtaacatcttgtgtgactatagtacaatatcaaaactaggaatatgacatttgtacagtatctagagtttattcctatttctctagttttgtaagtactcttttgtatggcatgtgtattgttctatacagtttaatctcatgtacatttgtgtaactaccactgcagtcaggatgccaaatgttcccttaccacaaagctccctggagctgttcttcccacccctggccctagccactggcaaccacaaatctggtctctatctctaaaatattatttcaagaatgttatatacatggaatcatgcaatttgtcaccttttggaattagtttttttcactcaacataactaccttgagatctatccaagttgtttgtggtcatgtgttgcctaacaacagggatatgttctgagaaatgtgttcttaggacattttgtggttgtctgaacatggacttacacaaacctacatgataaagcttactgcacacctaggctrtatgatagagcctattgctcctaggctgtaaacctgtacagatgttactgtaatgaatattgcaggcaattgtaatacaatggtaagtatttgtgtatctaaacttatctaatgtagaaaagrcacagtaaaaatacagtataaaagataaaagatggtatacctgtatagggtgcttcctgtgaatggagcttgtaggactggaagttgctctgagtgagtgagggagtggcgagtgaatgtaaaggcctaggacattactgtacactactgtagactttatacatattgtacacttaggcgacactaaatttttaaaattttctttaaaaattttctttcttcaataataaattaatctcagtttactgtaactttaattcataaacctaaaacattttttgactttggactcttgtaataattcttagattaaaacatgaacacattgtacagctgtacaaaaattttttcttccttgattaatgcattccataaggctttattttaaaattttattatttttatttttaaaacttttttgttaaaaactaaaatacacacatatcagactagacctacacagggtcaggatcatcaatgttgctgtcttccacctccacgtcttatcccactggaagttctttaggggcagtaacactcatggagctgtcatctgtgataacaatgccttctcctagatacctcctgaaggacctgcctgaggctgtttttcagttaactttaaaaaatgaatacgtaggaggagtatactctaaaataatggaaaagggtataggtaaatacgtaaaccagtaacatacttgtttattattcatcaagttatatactgtatataattgtatgtgctatactttttaatgcctggtagtgcagtaggtttattgacagcagcatcaccacaaacgtgagcagtgccttgtgctaagacattatgctggctatgacatcacttggtgataggaatttttcagctccattataatcttatgggaccactgttccacatgtgctctgtcattgacagaaatgccgttaagyaccacatgactatttttttyrgtggtctgttcctttttattattacagagtattccacagtatggttgtaccacagtttaactgatcacctgttgaagaacttttgggttgttttccagtttttgactattatgaataaagatgctatgaacatttgttcatatctcaaaggttctttatttttttttatttatttttctttttttgagacagtctggttctgtcaccctggctggaatgcagtggcgcgatctcggctcgctgcaagctccgcctcctgggttcacgccattctcctgcctcagcctcccgagtagctgagactacaggcgcccgccactgtgcccggctaattttttgtatttttagtagaggcagcgtttcaccgtgttagccaggatggtctcgatctcctgacctcgtgatccacctgcctcggcctcccaaagtgctgggattacaggcgtgagccactgcgcccggccttcagagattctttaatgggtgaatggttaaacaacctgaaaatataaaagttttcatttctctgggataaatgtccaggagtgtatttttagtttttaaggaattgtcacaaacctgttttccaaagtggctgtagcattctacattcctgtcagcagtgtgtgaatgatctagttatccttgccaccgtttgttgttgcaactgttttttattttagccatttcgataggtgtcgagtggtatctcacttttaatttgcatttctctcatggctaatgatggtgaacgtcttttcatatactaatttgcctctggtgaaatttcttacataattggagtgcttgtttttttctgttgagttttaagagtttaaaaaatacattgtagatatgagtccttggtcagatacgtggtttcaaatatttctttcactttgtagcttgccttttcattctttttaccgtgtctttcacagagtaaatatttaacattttagtgaaatccagtttatcattttttcttttatggattgtgctcttcacctagccctagatcctgaagattttctcctgtggttctttcctaaaattgttacagttttatgttttaagtctgtgatccattttgagttaaattttgtataaggtgtgaggtttaagtcaaggttcattgttttcccaatagattaaattgcagcagatcctttgttgaataggctgtccttcccctgttaaattgcgtttgcccctttgttgaaagtcatgtgggtgtatttgtgtgggtctatttctgggttctctagcctgttatattaattttgaacgaataaagttggcttatgtttaagttttcttggtagtagcgaggcaatggtgccttctgagcccaggatttcacaattttgtgagtaaactgtgttagaaattgtttgttattcttttggtaggttgtctagttcaatttcattgctcattaatcttgcttatagatagcaaattgagaggcatctcaaaaatagtatcttttgttagcttatctcacagagtttggttggagcagatattaaaacagaacaaaccaaaaataaattaaatatactagttagcaagtttatattgagggaaaatcaaaccatgtgaattgagctccaatgatgtggctggccttgggtcagattttagtatcatggttcaacaaggtagctattaaaatcttcatactttttcttgaaataattctttagtagtcacataggacagcacacactcatggatttcttctttccttactgtctctttattctcagcctcctgttccttctcatctccctgaccttttaatgttggccttccagaaactttagtctttggacctacctttgcactcattttcttggtcatttcacccaacatacagttttatgttattttatttttttatttttgagatggagtttcactcttgttgcccaggctggagtgcaatggcgtgaactcacctcactgcaacctctgcctcccgggttcaagcgattcttctgctcagcctccccagtagttaggattataggtacgtgccaccatgcctagctaattttgtatttttagtagagatggggtttcaccatattggccaggctggtctcgaactcctgacctcaggtgatccacctgccttggcttgccaaagtgctgagattacagatgtgagccaccacgtccagcctacagttttaaatatcaagtctatactgaggactcccaaatttttatctccatcatagactgatatcagcagtatatgagtgattcagttgtttttgcctctttgccagcatttggtgttgtcactattagttcattttagccatttaatagaatatatgtacatatatatgtgtgtatacacaggcacacatctatataactactcaacatgcctctggtgagatgaccaacaggtatctcaaacttaacctcttcctaattgacttctgcatagcactccagatctgctctttcctcactctcctccatcttgtttaacagcagctccattggccaaaattttggaattttcctcaatcttttctctttttcttacactccactgtttatttaaacagtaaggaaatctcgtgaggtcttcagaatatatgcagaattaaatcacttctctcttgatccctgccattccccaggtacgggccaccatctccttagggcctcctgctttcactcttcccatccctcattctgtttcaacacagcgtccagagtgatactttaaaaatgaagtctgatagatcatgtcttcggctcagaaccatctagtagcatgccatttcattctaaataaaggcaaaagtccttatgatgagttaccgatcctcatgtaatctggccttccattttccctctgatctcattctctactggtctcctcattcaccggatgcagccacaccaccctccttgtttttcttcggacattccaggcatgcttcagtgcctgggctttgcgcctgctgcttcctctccctgaatacgtttcccccacattgtctataggatgttctcccatacttctctcagatctcttggatttaggcctcctgggccaccatatttgaaatatcagattagttccccctcccccatyattcagcattcctcgtaaatctttgctgttttaaaaatagcactatcactgtctaacttactgtgttatattttgttaattttctgtgagttcttcttcactagaatattctttgtagggaggagtttttgattgtttggtttataaaatctggaacaatacctggcttataggaggtgctcaatttataatggggtgaatgaatgaatgaatgatgatgagaaagctgagaatcagtaaagtgactttccaaaacaggtagtgggcagtatagagttgggccataaatagctgcaccatacaacatcctgctagtttctaaagcaaatgatttgaaagaggcataaaacataatttctgccctcaggtagctcatagttcagtaaaggagtttagattcatacctataacagtagaagtaatagcaccaaatgaaatatggtattatgaagtggtacaaataatataaaaagatgaacagtgttagtagtacatgtttagaagggatttctgtggtgaaagtcactaggcacagtgcacctggaggaccgatttccattccatttagaatggtttaaagtaagcttttggaaactaggaagattactttctgtaatcctttcctaggcctttgattctagaaggattgtgttaaaggagttttaaatattttatacagttcttaaacattgttaagcttgaattaaatcttttattatgtctggccatggacgtcattggatcattttcatttcttgggaggattaataaagcacattccttctgttgggcctccagtgcggggagggtgttggccgagcagtggctgaraaaacgtttttcccctggtgttttcaagaaccctctttattagctaagtggtgagacatgccacctggtggttatagtagtatcatttttctcactgttcttggtgcttttcttctcsttctgattccagttatactaggacaactgctataaacctggaatgtttcacactatattatttcagtaatttcaaaaacagcagaaatcactaagctgtttggcacaaagattcctatttggaaggaatcagacaaagtgagtgttgagaaagaacagccaggcagaaagctttgcatcagtcttaaagttctttacatttcaagtaagaggaattgtgaaatccataagacatgtggggtttttctattactttctccccagtatctattacaaagatcagcacatagtaggtactcagtaactatttagaatgagtgcatgaatgaatgaagtatgtgtgatgttatggagtacaaagttagaattagcaacatgacctgaatttagaagcaggtgggatacttatacttttctcagtctgtgggcaccacaccattgaagtatatgtctaagattaatttatatttggttgtttgatttagcaaaacttgctgcctgttaaaaaagaaattaagacctgtcaacttaaagaatacattttgtgagttaagaactaaatgacagtataatttattacccaaagcagtttgcttctgaaaattaaagagttcaagctattaataattatgctgtgactgcaggcataaactgggaatgtcctggcaaatgaggatgtattgtcacctttctcagcctgcctgtgtgttgtttttaagcttcactctagtttatatattttaaatgtcataaaataccacatacttataagagaaaaggttctattcattgctgaagtggaagyttatcattaatttttatttatttatttttttttccagttttggaattcttattactttgaacccaagaaccactgataactagcacaatccagtgaaacagaggaagcagcagcttaatcaaaggaaaaatacatttaagattataagtctggttataagcttaaaaagtgacccagaaagggatatcattgctaaaaaaaaaaatccccttgtgacctgggtrcattttgcaaagccacaggtttgcartgttacacaagggccaaaggaggccatgagttgtctttggttgtggggccggagggtaaytgttcatgaaaatagtgagtgtctgaagattaagaaaatcatgctgcagcagaggagaagggagaggaaggcaggaagggaaaggagatgcctgagggtcaaaagctgagcccaagcctaagcccaagctcaagttcaagccccagcatggcacaattttgtgaattaactcaggctgagttgcctccagtctttggaatgtcatcttatactggtactgctgaggcagagggcagtaattggttctttgggataggagaaggggcagttgctgaaatacaaaattaatagtcagcatcccaagttcctyaattgcagccaaaatacatgtgttcaggcctttcggcagtaccgcccccagaactaccagctgtagtgtggtctattcccagacagcaacatgcaagaataagtttacaatacactcagcccttgtggcttaagatcaggggctcagaggctgtgacaactcatgatgctgaaaatgtatccaatgaaaacgaagtactagctygtttagtagtaacgaagtactattaatttttaatatagtctgatactttattttctaattgtagaagcaacattcttagctatatctttctagaatgttgaggcaaaagagtaaatttatagtgattttcactgttaccagattgctggaatagggaatttctggtagcaagatgggaatttttaagttggaagggtctaacacatcatatagccgtctccatctcattttttttgctgaaaaaactgagcccttgcaaatgtcagttgcaaatctgggagtagtactcatgtctctgaagttgttatatagaattctttttatttattttaataacaatatttatgatagttgaaactttttgagtgcttactatattttatttcatgcattatgttcagcactttacatgttttatctcacttgatattcacaactttatgagattggcactgttattgtagccattttatagatgaggaaactgaagcttagagagttaaataaagagctcaaaatctcacatctagtaagtggcaaaaacaggatttcagctcaagcaatctgattccaaaacagacytttttcactgtgctgccattcttttgcctggtttttctgttaacttcttaaatatatgtcatgtttcatgcttacttcctcattttcataaatatattacctgctcacttatacattatattgcttagaaacaaacccaaccctgttttcttatggactgtatcctgaaaatcactgtttttaatatgtggttaaacaagtgttttattagtgcatttatataaattatttaaccaaaacacttaaccggtgaaagtgctttactgtgagagtgagaatgtgcatgttctaagaacctctaatttttaaacctcccttattctcagccttatatttgttaaaacctgtgtgttaacacagatgcacccatgttaggggttaattagagaaaccaacctctttatagattagcttgttcatctttaagttgctaggcaggcactgtaaattcagagaacaatctgattgtaagccacaaatcaatgaaattaattttggggttgccttttaaaatagtgtcacaaaatttaaggataaagaatgcaaaaatgatgccaattatctcatcacattagttttgatttaatttttttaatttgaaaaaacctactcttaaacttaattgatttttttaaatataagtttggagataatttttaattcagtaaagttatagtgattgaaaaagtagtttataatttttaataaattgatcttgttttaattttgagtcatattctagaagtgcttctttgcaaattggtaaattgcacatacatttccacttatatacaagataattgctatggttggtttgtataatagatgcagtgcatctgaagagctattttatgagaatattgtttcttgtatctgtcacgagccaaaaagaatatttttaagaaagttatattcttggtgatagaacagctgataatttagaaacaactgtaagacagtccactttttctgattatgaaataataccatagttaagtgtaatttcctataatagaataaaaacacsagwtctagttttaggggaggcatgttgttacygtaccttagaatttctggaagatgacatattcatgcttttcctgataactgctgagtctcctgctctgtctgccaatccagtcaagaagcctttgctagcaatcaattaataatacgtttcatttatacatatttcctatatatagtatgttattgattatctcagtaccactgaagagaggttatctgggtcattggagctttgcttctagatttgtgaagccataaacctatatatttmaaataggaggccaaaaaaaaacgaccattgctttatatagttagattttcagtgaattgagagtttatcatttgtaattatacattaatcaaatataaggcataatatacccccctgcttatatcagcaccatttcaaatgtaatgttaaaaaataataaatggagaagtagatagctaacaagtaggcttaatttaataagacaaagtaaatggcatttggaaacmtcatggatttaatgttttatttaaatgatttctgatttttaaaaagtaaatattgtwtccagaaggctgagaaacaagttagtagggagattttttctttgcaaaaaaattttacagttgtgtctttaacattgtaccacaaactgttgtcctaccagtctctttgtaagaaagctatagacatgttgggaatgaatgagctctttcctttttaaaatatcagttttacatcattcaggttccaatcgttgcacttactgctactgcaagttcttcaatccgggaagacattgtacgttgcttaaatctgagaaatcctcagatcacctgtactggttttgatcgaccaaacctgtatttagaagttaggcgaaaaacagggaatatcctkcaggatctgcagccatttcttgtcaaaacaaggtaaggatttaatggttgatgaattttggtaatgatttcctttttttttttttaacaacttatgtattttatgttatttaygatttccttctaatgcatatttaacatatttcaaattccacctagttttggttcaagtcaagcatgatgttatataatcaattcagtgattgagactagtgtatttttaaaagcagaaaccaattctcctaatattttaataccccattctgttgcttaaacagggcatatactatttatttttattttttaaaattttacttatttatttatagagacagggtctctctgtcgtccaggctggagtgcagtggtgtgatcacaactcactgcagcctcaaactcctgggttcaagcagtcctcctgcctcagtctcccaagtagctggaactacagtcttgcaccaccatgcctggctaggacatatacttttaatgattgataagtaaacaagcaaacataaaatgactctttcatctgaattctgtctagtttactaattacatgacttcagtcttaaggagcttagaaaaggtcaccttacaaacacagtggagcctgtattgtgttccaaggactattgtaggcgctttctatataaaatgatctaatttaatccctataactgctcagtaagttacgtattattttcattttattgttgaggaaactggcattagtacttttttctgtttattttgtttaaaggcattttaaatatatatgttaagaagttttcaaaagcctatattttactttttataagcctttattttactatttgagacagtgtcttgctctgtcacccaggctggagtgcagtggcgcaatcccggctcactacaacttccacctcctgggttcaagctattctcctgcctcagtctcccaagtagctgaaattacaggtgtgcgccaccatgccaggctaatttttgtattttttagtggagacggggtttcaccatggtggccaggctgatctcgaactcctgacctcaagtgatccacctgtgttggccttccaaagtgctggaattacaggtgttggccactgcgcctggccagtttataattttaaacattaaaataaatgcttcttgtccaatcatggtgtctcacacccataatcccagcactttgggaggcagacgttggagaatcacttgaggccaggagttcgagaccagcctgggcaacatggtgaatccctgtctctacaaaaaatacaaaaattagctgggcatggtggtgcatgcctgtagtcccagctatttgggaggctgaggtgggaggatcatttgagcccaggatgttggggctgcagtgagctgagatcacaccactgtactccaggctggatgacagagcaaggccccgtttcaaaaaaaaaaaaaaagcttctaccaatacaaacacaaaacaagcatagacaaatagagtttaaagaacatcattggtgttttcctctaaagggaatattgatgctaggccaaraaaatcctggagttattcttgaggaccttaaggaataattgaaatgtaggatttgctcctggctttcttgtcctatattcagaataaaacaagaatggatcgaatatattctgagtgttctggccattctagtgctctctgaagtgagtactcactgtgtttcacttccctttcatcctaaagaggaaaagttcttttgaagaaggctgtttgtcctaggttagagtctccacagtcagatcattatctcctcctaatctttgatcctgttcagtctctatggtactttcccttataataacactctctatggcactttcccttataataacactctcctttttaaagcagtttgccttttttgtgtgtaatattgttctcctggttttctgacgtcctggtcctcttataatcctatgcaaatgtttctttctgtttttcatgttgactctgctaattgaggtctttgttactttttagccgagactattataatttccccaacagatayccctctccccagtgccccttgttgctttctatgcagtttacaaattattgtctgcaaacacatccttaagtctggaatacctttctggaactccttactaggaaataaagaccagactcagtgtaacattcaacagtattgaagatctaggtatttaatatgaatttttttttttaaggagatcaagaaagatttttgtacccatttttaatcctccaagaagacttaggatagcaggaaaccattgagagtcagaatgctttctacagatcttaggtgaacagaaactttcctcttcatgagcagtgaggtagagggtaattaaggcttcagagcattgcccgttatttccatcttcttcccttcctttaattctgctaaattcctttaatttgtttatcagtattcaagtatttttatccattgagctaaggtgtttcttaaactaaccctattttgttaaagtcttaattataatatattcatagtacatttaagtgagatagatgagtctctcatataatttagtggttagattagattagaattttctcccctcagaaaattaagaggaaataaaagtctgtagcaaatcacttggcaaaataatggctccttttgtaataggaatttttactctttygatttatctgttacataagttcaaatttttacatattttccaccttttttaaaaaagagtgatatgtagtcaatatcaatttgagcaacactgttgcatataaattgaaaaggactccaattttctaattccgtacctcagttgtgatcactgttggtattttggcatttatgtagacttcctttctctgaccctactactgtgcagatatatagttgcagttttttgttgttgttaagttgatacagaaatagttgcatactatatccattatttatgcaaattttttttcatttaaagtatctgctatctttccatatattgcattttcttaaattagagccttaatatataggatattacaatatctaggttttgttgagtagttttttcttctttgaaaacatgtttttaaaataagrtttttttttttttttttttgacatggagtcttgctctgtcgcccaggctgtaatgcagtggcgggatcttggctcgttgcagcctctgcctcctgggttccagcgattctcctgcctcagcctcctgggtagctgggattacaggtgcatgccaccatgccctgctaatttttgtatttttagtagagacggggtttcaccttgttggccaggctggtctcgaacttctgagctcaggtaatccgcccgccttggcatcccaaagtgctgggattacaggcgtgagccactgtgctggccttaaaataagatttttatacactaaaagaaaacttacatttttcactccattaagtagttcactgtgaatttttgatattgaagcccatttggttgctgtcaaaaatagatttgaacagattattcagtatgactcttgtagtgaaattattgccttgtttcctctgcttaagttttcagtggcttttgccacagtccttaaaggttttataatttttttaatgtttaatttttaaatgtttgcttaatatttcttagtatgagtgtagataatgatgaacatttagatgactttttactattataatgttgcagtgaatatttgtttacatttatcttttggccaataagcaaatatttttgtaaattagaatcctaaaattgaaattggatcaaaagttatatgcacttgaaattgattaacttttcctaaatctaaaatagtatagtcttttttatattgtcagcataaatgaatgcacttatgtaaatgaatatttttaggcgttaagtaaaatattctrtggaaattgaacatttaagttgtttatacttctatggaaatcgtttacgcttttaataaagaagcacaagtttctacaaaatacattctaacagatgttttctataacattcagtctcaagattactagtaaatacttctttgaactgtaaaagcaatctttcaatattataagaaagctcttgctttagtaaacatttagaaactcagctttattatcataagcaagaataagaacagtgtaacaagttttatgcacactcctttgtaaaccctcaccagactaattgttaatctggtgccttgcattccccaaagtatttgtatctgtcgtttataagtttttatcaaggtttcagctaaaacaaataaatttgtttctggttttagctttaatttgaactgaaacagtcaaaactgagttttggggacttcacacaattcatttggatatttgattctccataatgttttaaattttcatgcacttaaatatatcattatttttgataggctttcttcctttagtcttttctttagaaggtagaaaggaagaattaaataagataaaaccaaaygggtctgaagcatgtataaagtatatatrtttgctcttttgttcttctttttctttagttcccactgggaatttgaaggtccaacaatcatctactgtccttctagaaaaatgacacaacaagttacaggtgaacttaggaaactkaatctatcctgtggaacataccatgcgggcatgagttttagcacaaggaaagacattcatcataggtttgtaagagatgaaattcaggtatgaggatcaatcatcattgctctccrttgctcatagtggaagtggatrtttctcaaatgtttatttaccagatctttattgaatactttctttgtgttgaacataaagcagtccctctgataaatgtgggagaacaaacttgcagattagtataaatagcaatctgtacctagtgcttaggtgcacagaggagggaggaatagctctgtcaaggtagttgtgtaatgggggtggtccatccaggaaaattcaattagagtccaaacatgtaagtagaagtttttcaagtatgccaggccagtaggtgatgaggggaaaggaattggttatagaattccaggaagaaggactagcaggtgcaaagacactttgatatgagaacacatactgggttcaggaaatgtgactggtatggaatggttggagggaaagacaatgtggggtaggaatggcacaaagtatggacaaagaggcagggtggaaccgttagagacttgagagaacagttgaatgggtcggttggccaggttatagatggctttaaaacttgcaaagaagcagtctgggcttggtatcatatacctgttagttttcactgactactttagccttagaatttttagtttagatacaattttctgtaataggtaaaacggattaaagtagaataactctggctgaagttaatgtgagggaaaaggaggtacaagagtctcgtctctagaccttgaagacactccctgttggggtcttataatccttggagtgccgcagaatcatttgaaaaccatcttgatgtactactctgtgtttttaaataagataataggattatagaaacattagactggcagcaataagttggattgatttgaagaagagaaactgaagaagggaaagggtatcgatgcagctattgtgaaattctacagttgagattcctgacctgattggactggctcagtgggtgtcatagaggatttatttgggaggatttaagttcaaggcacatgagtaggtttaagtcaacaacttgacactgtcaacatgaaatccacactgtaactataagtccgaggaagagccctctcctgaagttaggaatttaacttcagctcttgcattttctgtcccaccggtcatccatttcttctctatccatctccttttctgatatctagttgttatcagtgttgttgaaaagcttaagtatgattcatattcactgtctataaagttcactacacatagtcatgctgtaatgcatacccgcctgaaagcatctggtctctcttttccttctttccaaagataagaataccattcacagctgtttagaatagaaattttatccaaattcttcagtgtttatatttttgttctgttatttcagtgtcttgaatattgtcaaatgacatttattagctactactggtactactgaatcttaataatcaatcttcaagccattaactgaccaatggtttcttctatcttaatgtattagtaattattcatttagagtaaaacatctcccagaacatgaaagaatacaaactttattcatgttacgttgtgacaggaractttgttggatgcrcctgattttcctgccaatwcacarcttcattaaaacagtaatgctttgaaatatggcttaggaaacttcacaatgatcattaattacacctaatttctggaagagtatatgcatgtatgtgttgcggtattctcccttgctgtggcaggatgtcacaaatttttatccacattacgaaaatttaaaaattgatatggttttttctccctacgttgatatcagatattttgttttatctgacagctggcccaatgtactcctactttgccattataaagaattcaaaagcttcatatttgcattgaaagttctcaaacactttgtaaagatgatgaaagtatgtttcatcatctatgtagaatagtcaggtgttcttgcaattgattacttgctaccgagaattgaatacctactgagtgcataatgtatagaattctagatattcacttttgtgtgtttttacagttgttatataccttagtgtggctctaaaagtggaggtgacagctgtagctcttaatgtcttacactgagtgatgtttagaatcttaaattttcttttataattttagaaaaaagtatacttttctttcttatttttataaccagatccaaacacatttgcatgtagataggcatttttagtcttgaacattcatttttacttttaatcctcacttttattagtttcgtatctttttgtatttcatttcccctttcaagatgccttgagtcctttctttttaggaatgatgttgtgaataaattatttgataaaatgtctttacacctgagagtttataaggatagtttgaaaatcatgtctgtaaaataggttgatctcacctaaaaataataccatataattaaaattagaattattattgtgttgcttattgactcttacatatatcaaaaaattgctgagtcttattcagccagagcttttacttagtatgatattcattcctatatttacttttttctcacctttctcatactttcttttacttactcagcattttcctcctttcctccctcctttcttttcttctttccttcttttctcttcctttcgtattcctggtccatcttagcatgtaatctttctttatgaaatggcatgcagataggtctactgttcttacagtaaaaaacttcaaggcctcatgtctttcccacttctgtttcccattcacaacctttttagctgattcttttggtactttaccactatatcttgccatagtttatgtacctggctcctacttaattttttgtttatttgtgtattagtcgtaggcattatttatcgactcttctctctgaaagatgaaaggttagctctctttcacattcttaactgcccttttttcttaccttgtccatgtatttctaaccccctttcctcctaatatgtttatgtcataattttggctagattagtgtatacgatttacataattattactctgtaaatgctttttatgatctctgagccatgtagtatattatggctatttttctttcttatctatttgtatttttattgttattacctaaaaaaaaattttctatgtcttatcactaattcttccctaaaatttcccacaattgtgtaaacttacctcagtatattcatagatatgagacattctatcaattttaccctcttaaagatgcagarataatgcattatgtttcatcccaccatctttaatgagaagcttccatcttagattaayattagagaatgttaaaatactctgcaatcaggtaaggacgcttgaaacttcatyataatgcaaaagttttctttaacacaataaatattttgaacccyttttgtgtcttgtattcataggagttcagatagaccactttatttactattttttatagagagtgaacagaaatcccatttctagtcaccagtccttaatctgtaaatcaggcagataatctgtaaatgattggttgaaatcacattgaattccactttgtgccagggacttaagttaacgaacaaattattcttacaaaaaggtataaatgtaaggttttcattcygctaaatatgtttgtcaaactgtgttgtgatttgttctcagtgtgtcatagctaccatagcttttggaatgggcattaataaagctgacattcgccaagtcattcattacggtgctcctaaggacatggaatcatattatcaggagattggtagagctggtcgtgatggacttcaaagttcttgtcacgtcctctgggctcctgcagacattaacttaaataggtaaaaaaaatttattgtttttactcttgcagatttctttctttctttccatataaacctcaaaagtgtttgaggctatttccagtatcccaagtaatttgtgagtgcatttaaagtaaaaaaaaaaaaaaagaaaaataaaacctccccaaatccagaggacatgtaagaagaacatttgtggtaagagttgccacttggagatgagctaatttcagcatgccttagttagtgtgaggaattaactaaatcaggacaatacttgggcctgtcacagagatcctatggaatactttcctaccattgtgcattaatgaacaggttcttttcctctcctcagatcctgtcaagttgcgatgtcttcagccatagttacttcaactaccactgattttgttactgattctttcttcccatgctacagtggtgattattccagaggatttctctcagtccctatttgactcttgttactatttgttttcttggttagttccatgagaccatgccagttctccttgactgtgtatgaatcattgtgttgcactgtactgacagactgccgtaagtcaatattaagtgttcagtatctaagtgcaggagaacctttctacttaagtactcaacaagtagtttgttggcacttaagttctatgagattttttgttgtaaaggaaaacattatcttgcaaagattttggggcagcatttaccaatactttgttccttcatccgtaggaaaaagaatctcaggagaaaaacctatacatggtaaccaatggggctgccaagctgatgaagtattttcagagtacacctttgtgtagctgaataaattgagatcttgaatggacatattagctcattttagtaaaatgataagagagtgcctcccactacagtttttgtttttatgcatcattaaacaatgtgtttttgattgtccactgtgttccatgaactatgctatgtgtgggagatatagtagtaaagaaaagcaaagtacctgcttccatagaattcagtataatgggaatggtaattctttagagaatcacataactatggatacataggcttcattttactgttctccttttgtgtttgaaaatgtcaacaatcaaaattttgtaaaaaaggaatcatgcaacatatttaaaattataactgtgttaagtgtaatgaagggaaattgcactgagtagtaagaatatataatggtgtgtggtatttcccaagttaaaaaggtcagataaggcttccttgtggaagtgatagttcaaatctgaaagartaggaattaattaggtaaaaatgtttgatgcaaattttaagattttccttctgagtagtcagtagcttttccttcttaacatagaagatgacaaaaccatcctttttttgtacataacaattcttgttttcctttagacagttgtatctgtcaagcttcttatgatctaatttaaataattgggatagaacacagctgtacatgttactattaaatatggaatatatcaaacataagttgattcctaccagttctgattttatttgtgtattttgttaaaggtactgaggacattaatatccagttttatattgtgcatttgaaggttcatcaataaatacaattcttgtttctctgggtcttaaaagatattttaaatggttatctcattaagatttaacaggaaataacagtgattcaaatcaaatagtggtgccagaaacccatacttgaattttgggtatagacaggttaccctttgcatcaatcctgaggaaactaaaactataggattaatcaggataaaaaagaattgagcaaggattcaggagggatctgtatcatcctggtgacaaccctcttctagaaaaaactagaaagtctaagaataaatgaagttgctggttctcacctggaaaggtcagttactcacaaaatttttagagtctatcttatgccataattctatcactgagagaagaaacttgtccagtcatcatgtaatcttcatgtaaatttatgtttttaattgcagaattcataccacaggcaaagtcccaatgtctgcatttgctgttaccttaaatagtcaaaccccaaagttattgtaatctttttttaacagagaataatttgcagagtaatctcggtccggtagatctttcagtggatccaaatgattgccatgaatggtttagaatttttttaattttcaagttgtttttattctgtggaatactggacttatttttgtagtcccaaaagaaaaataaatatttatttatttgccgttaagagttgtagttttgttttctcaaatttgtcctgacactgacgagattagttaaatgtaggtcatctgaaccaaatacaaggaaggaaggacccagttctgaagagtgtgggcatttcttttcttgtttttttttttttttttttttttttctataggaggggaacgaggtgaactaaacaaacaaaataaagcaaaaaagaactgatttttatcccttgaggtagaaagaatgagattacagtggacccccttgtctgcattttcactttctatgttttagttactcacaaccacgtccaaaatgttaaatagaaaattccagaaataaacaatttataaattttaaatcagtggtggctttgagtactgtaatgaaattttgtgccatcccactcagtckgcctcgacttcccttagaatcatccctttgtccggtgcattcacgttgtatttactccctgtctgttagtcacttgttgcagtatcacagtgcttgtgttcaagtaacgcttattttacttaagaatgaccccaaagcacaagagtactgtgcctaatttataaattaaactttttcataggtatatacatataggaaaaaacataatacatacaggatttggttggtactattctgcggcttcaggcatccactggacgtcttggaatgtatcccttgtggataaggaggaactgtatatggttaacctaggagctagagtcaacagttggaagagactttggggataattacatggaagggcatggtgggtggtcgtttcagatgacaagaatgtttttgaataacggatcatttgtgtcttcagactttccagaactccttgagaattatgcagaggtatttaatcagtcagaaggttgaatagtcaaattattagtgagtgaagtctattttgatgaggattttactaatgctgtcccttagatrttataagtaaatcgttgttttcttttgaaatatctgaaacctagttaacatggactttcatttgttcttgtaaagatatgcaaagctatttgggagattgtcatcatctgatatttgatattcatgggctttcttcacagaagactagaaattaacagagtcatgatgaattatggctgcattgactttaaaaaacaaacacctccttaatgttatttaacaattttgaataaatttgatatggcaaacaaatcagttataatcgattgagaaaggaacttaattctaatacttgactggtgtcccataataacccataatactaagagacagttttggagggcgagaagtcctgaagagctgatagagataaaggttcaaatttgagcttctttcagtgttccttacgtcaatgcttttagtttctcatacaaaataaaataaagaataacctttttactgggaaaaggtaaaaattaataaattgtagaagcattgtttgaagccaaaaagtgtgtgacatgtaaattgaaatgaaaaaccttagagtttttgatactttttcaaagcagctaaagaattgatacttggacacaggaagaattttttttcaaaagcaatttttataaaatcagaaaaatgtttacctcttgttgggggcattgactggaaaggaatacaacagaactttctgagatgctagaaatgtttttttatcttgatggggtgtgggttttgtagataatgaaaaataaacagtaaaaaataaktaaaaaaaaaagtragaaagttgccaatacagttttacatattcctgtgmtgtttttaatcgacaggcaccttcttactgagatacgtaatgagaagtttcgattatacaaattaaagatgatggcaaagatggaaaaatatcttcattctagcagatgtaggagacagtatgtattatttattttrtgccaatagtatggatttatggatgatgctcttttaagacaacaatttggctaaataattatcagtattttgaaaaaatattttgttgctgttacatgtgtgctgaatttttaaggctaacttctttgtgtctgagtaaactgaagtcaaataatgaagtcccaagtgaatcaattaatggtgattttacctcattattttcaggaatgaacttaacatatacgtttctgttcttttatttaatttaaaattttgtcttgggtagaatcatcttgtctcattttgaggacaaacaagtacaaaaagcctccttgggaattatgggaactgaaaaatgctgtgataattgcaggtccaggtaaagatttcttattatagatggacattctaaaastctttctttctcttccttttcatgtttaactgaatttttgttgaatgataagtatttcagttttttaaacaaaacaatgaatgtgtttagatatgagaaagcaaacaatattaaagtattttgcttaaaaaatagataaagcaataaaatggtagccctaaatctaaacatatcaatagttatgttaaatgtaaatgatctaaaatattatttaaaggcgtaaattgtaagaattggtttaaaaacatgaccctgttctgtacgttgtccacaagaaatccactgtaattatatagataggtttaaaaaagaatgaaacattacattccatgaaaacattaatcaaaaggaagttggagttactttaatatcagacaatggacactttggagcaaagaatattatcaggataaagaaggatattatatgatgtaaaagaatcatttcaccaatgtatcagtcagggttcaccagagaaataggacgattgatattatggagatatatatatatatatatatatatatatatatatatatatatatatatatatatatggggagggaaaggaagaacaaatatggggagagagggatgaggcgactgattttgaagaattagctcacgaaattgtgggggttggcaagtctgaaatttgtagagcaggtcaataggctggaaactcaggcaagaggtgatgttgcagtcttgaggcagaatttcttctctagcaaacctagtttttgccctttagtcctgccactgagtggatgaggcccacccacattattgacaataatctcctttacttaaagtcaactgattataaatgttaatcacgtctacaaaatattttacagcaacatctagattagtgtttgaccaaacaactgagcatcataggctagccaagttgatgcataatattaatcatcacaaccaagaagacatcatcctaaatatatatatatatatatatatctacttaacaaaaagactgacagaactgaaaggagaaatagagaaatctacagttacatttggtgacttccagcatctctcaataatcaataaaactgacagaccaaaaaatcagtaagaagacagaagaaatgaacaggattatcagcatgctggatctcattgacctttttagaacattctacccaacaacagtagagtacacattcaagtgcagatgcagtattcatgaacatggatyatattcagagtcataaaacaaaccttaacaaatttaagaatcttgtatttgtatattttttgactagaatggaattaaactagaaaacaataacagaaagataacagaaaagtctctaaaccttagaaattaaataacacacttataaataaatccatgagtcaaagaggaagtctcaaggcaaatcagaaaatgttttgaactgaatgaaatgaaaatacaaaatgtgtgagatgcagctaatgcaatactgagaaggaaatttatagcattaaatacctatgtaataaaagaagaaaggtctcaaatcagtacctaagcttacatcttaagcaacaagcaaataagagcaaaataaatcaaaatgaagtaaacataaggaaataacaaagaacataagtcaatgaatagaaaagctatggtcataccactgctgtccagcctgggtgacagagtgagaccctatgtcaaaaaaatttaaaaacaaagcagcatgcagcattcattgtcagtgaatagaaaatgggaaaacaatagagaaaatcaactcaaaagctcattctgtataaagatcaacaaaattgatataaacttctaacaagactgacggaaagagaaaagacacagaagaccaataccaggaatgaaagagggaatttcactacagacctcccaggtattactagggatgataagggaacactatgaacaactcagaacataactttaataatttagatgaaatggatcaatttcttgataatctcaagctaattaaacttacagtgaattagataacctgcatagtgttacaaccattagagggattgaattctatgttaaaaatctctgaaaataaaatcccctagcccaaagaatttcaatgacaaattctaccaaacatttagaagacaaaataataccaattctatagcatgattccatttatataatagtctttgaaacataaaactatactagagggatgaagaaaagatcagtggttattagagattgggggagggagaaggtatgattccaaaggatagtacaaggcagtattttggagtgatagatttatcgtgccctgattgtgatgggagttagatgaatctatggatatcttaaaatgtgtagaactttacacatacatacaaccaatttgcctatgttaattgaaaaaataaaataaaaacaaattatttacctggtgggttagctacgtacctaagttcaatagctgcgttactgtaagacaaaagaagcattattagggatggagttgttctctgtgtaatgacaaatacttccttcactaagaagacagaattgttttatgcacctttaaaaaaaaacaaaaacaaaaaaaatacaaccaacaaacagtaacttgctggtgcggtggctcacacttgtagtattagcactttgggaggctgaggtgggaggatcacttgagaccaggatttttaagaccagtctgggcaaaaaaccgagactgtgtctctacaaaaataaaaaataaataaaaaaaattagctaggcatagcattatgtgcctctagtcccagctactctggaggctaaggtggaaagatcgcttgagcctggaaggttgagactgcagttgcagtgagccatgatggcaccactacactccaggctgggcatcagagtaagactctgtctcacataaaaaaaataataataatgataaaaactagtctgggcatggtggctcacacctgtagtcccagtcctttggaaggccgaggcaagagaattgcttgaacccaagactttgagaacagcctgggcaacatagcaagaccccatctctatttaaaaaaaaaaacaaacttaaaaatccagcaaatacataaagcacaaagccgacagaagaggtggagaaatcaacaaatccaccatcaaagtgggagaatttgatataattttaagttattggtagggtaaacaatccaaaaattagtacactgtagaaaatttggtcaacatagtaataagtttgcttattactatttatcagtatacatagtatactgatttatcagatacatagtatatggagccctagagcaagcaactatagcagtgtatctcaagtatttttacttcatgacccacatagcaaatgatatgtgtatataacacactgggctaattgtcagagttcagtttctgtccaaaaccctaagatctggagtgattaacctttcagcactcttagaactcacttgtttgtagcacactgattgagaagcactgaaagacttcactcctcaaacatacatggaatatttctaaaaactatgtattgggccgggtgcagtggctcatgcctgtaatcccagcactttgggaggccgaggcgggtggatcccgaggtcaggagatcgagaccatcctggctaacatgatgaaacgccgtctctactaaaaatacaaaaaattagccggatgtggtggcgagtgcctgtagtcccagctactcgggaggctgaggcaggagaatggtgtgaacccaggaggcggagcttgcagtgagccgagatcgcgccactgcactccagcctgggcaacagagcgagactctgtctcaaaaaaaaccaaccaactgaacaaacaaaaaaactaaaaaacaaaaacaaaaaaactatgtattagagcatgggttggcaaactatggcctgtaggccaaatctgcatgctgttttatttttttttatttttttgacatagggtcactacaggctgtcacacaggctggagagcagtggtatgatcatagctcactgtaacctcaaattcctgggctcaagcaattctcttgcctcacctcagcttcccaagtagctacaggcatgcactaccagacccagttaattaaaacaaatttttttttggtagagacagtctcagtatgttgcccaggctggttttcaaactccttgcctcaatcagtcctcctacttcagcctcctaaagtgctgggattataggcmtgagccatcacgcttgactaatgtttttgtaaataaagttttctcagaacacagccatgccttttgtttatgtgttatgtagggctgcctgagttaagtagttggctrcaaagcctatcatggcctataaagcctgaaatacttactatctggtcctttatagaaagtgttttctgaccctgtactagactagcttgtctcaaaattcttcaatgaatttggaagttttctcaccacattttctgaccataatgcacttgagttagaagtaaataagcagataaacaacaaaatcctcatgcatttggaaattaaaaataacacttaaataattcatattcaaagaaaaaatcaaactggaaattaaaaaaaattttaaacctacagataactacattaatatgcattaacatttttagaacttagggatagttacaatgatatacattaaaactggtaagaggctgggtgcgttggctcacgcctgtaatcccagcactttgggaggccgaggctgggggatcacgaggtcaagagattgaaaccatcctggccaacatggtgaaaycccgtctctactaaaaatacaaaaatcagctgggcgtggtggcacgcgcctgtagtcccagctacttgggaggctgaggcaggagaatcgcttgaacctgggaggcggaggttgccgtgagccgagattgggccactgcactccagcctggcgacagagcgacactcttgtctcaaaaaaaaaamaamaaaaaaaacaaaaaaaaaaactagtaagaggkcccagtggctcacacctgtcattctagctctttgggagactgaggagagaggatcagttgaggccaggattcaagaccagtctgggcaacataacgagaccgcatctctacaaaattttaataacaacaacaaaaaaactggtaagaggcaacattgaatagtactttgtgggagtttattagcttgaaatactcataatagaaaagaaaattaatcagctaagcatctcactaaagagattaggagaataaacctaagcatagtttttttcccccaaacattattatatctggaatattgaatgcattcttattgctatttcaaagatacttactctaaggaaagcaattgaattaggtagttgaactctatagtagattttctttaatgagtccttttgttctcaacctacttaaataattctcatttgaatttatgatagtttcagatctacccaaagggtgacttaggaatttaacttctaaatctatttaaatgaaaggtttataatctttktgtcatattttacagtcgttagcgtttaacaatttatagcataggatttgggtttttttttttttcattttaaagaaraagtttatttaagcaagacacttgactaagggaagactatcttggagttattattactagagtaatttatttctacttaaagacagattgccccacaagtaacagctacataaaaacagttgtaaaattgtccttggttttacaatgataaatgaaaaacattaaaattctctaattgaacaaggtatgcaaggatttttatattgttttttgctaaaactatgacagcaaaataacatcctggagtataaagataagagctgaatgagcaggccactaggggacaaagggagtcttttcacagaaccaatgcttcttttgcccaccccatctccatcgaagtcaatctaaacatattattggccatttagttaaaaaaagaaagaaaagaaaagcaatatgcttgtggacatacaccagttactttatgtgcartaaaagagtaggaaggggaaggtgaaagaatagagaaaactatgtagtcaggatgtggtggaaccaaattgcaactttcttttttttttttttttttttgagacagagttttgctcttgtcacccaggctggagtgtagtggtggcccaatcttggctcactgcaacctccgcctctcagattcaagccattctcctgcctcagccttctgagtagctgggattacaggtgcatgccaccatgcctggctaatttttgtatttttagtagagatgggttttcaccatgttggccaggctggtcttgaatgcctgacttcaagtgatccacccgcctcagcctcccaaagtgctgggattacaggcgtgagccactgcgcctggccaaattgtagctttctaattgagactgtcttcttggtctggaagagcagagttctgcagtaaaataacaggtcccccttttagtagacatctccatgtctgctgctggaacacatcagttttgtcttaagcctcacttccaaatgtgcagatgtgtctggttcattgattggctgcctgtcaaattgaaacctgatctgcctcattggcaaaccgtgccccttacaataggctttcattggtttactaagcggtgtggtgcgtggctgttcatcttaaactgcaccacagtttaagatgaaccttcaaatgaacattatccttgttctcagtcttgactttccttgggctttttgtggaccctggtgagtgtggcagtctcctcagctgctgcttcacaaaagaggtaccaggtctgccccgaatgagtgagcccctaaacaggaccaggagtggcagaagaaagaggcagcaactgagatgtgttttttctaagctgaaaggctttttttttttttttttgcaacacacctttaacactaaagtccaatatttatataattggtcaagtaagtggagctgttctagctataaatatggcaactctgcttgctcgtcctattattgacattattcctttctgtggtctgaggtgcctcccatgaaacttgcttctaggacactaggattgagaaccatcagcgtaacatatctgttaygctacaatagtttattttcatattttagctactttacatactcgggtataatgaactttattcatagcttctgaagcagttggcacatttgagatattttttacttggctaattgttatgctaaatcttttgatttctaaagatacatgcctttgctaagctttcttcaaatgttattatttttatttagattggatcattgctattccatggatgactcagaggatacatcctgggactttggtccacaagcatttaagcttttgtctgctgtggacatcttaggcgaaaaatttggaattgggcttccaattttatttctccgaggatctgtaagtatatatctgtgaattcccttcatagatcttcttttacttctattacacttttcttcagaggtttgcagtattatgattgtarctttgacttcagatgggtgactaggaactcatagagtcttactaagttccagttaaacactacattcattactttggataaaacccgtgtgtatggcatcttctgctgttttcatgttcaagccgatgttcagctctgcagctcagtctggaagcattgtgttaatttatcacattgcatttgggtgaatccctagactagtcttgcttaggataattaggaaaagttaactttcattgtatcaagggacaggtagaacaaaattgtccttttgtccaggaaacyattaaattcttcaaggaaaactttagttatagggattattttttaaatgtctaatttcagtaacaatatttgggacatatttatttttccttctgtttcctatcagaagtatttaaagttataagaaaattgtggtttttgcctttactaatgaataaataatcaattaaattcagttacttttttttggagtgattgatgttccagtattcttctaaacaaccacgggtacaaatgtgaataagataggaccgttgcagtccaagagcttgttctgtagtcctttcctttatatgattttttcccctgatttagaagtctataaagcaaagctaagtattacacactgataatggctgaataaatcaagagcaagagataggatactttgcaaatatgcatatttattaaaaatgtactttaaaatagagattaaaattctcgtattgaatgtagaataggtaagcatttatttgtgaaatactcgaatgcttcatgtaaatactttctgagtttgtatttttagaaaggaacattttggaggctgaggcaggagaatggcgtgaacgtgggaggcggagcttgcagtgagctgagattgtgccactgcactccagcctgcgcgacagagcaagattctgtctcaataaaaaaaaaaaaagaaacatatttattaaattagttgtgaaatatttttaatgaaatatattgaaaacttctgttgatttttcatgtactgatgtttttagattctaaatggagtttaaaattttgtttgtaaatcacaagttggattagaaatttaatagtagaagtgttgcctaaggactattttaggtgctgtgagtgaaactgtattttttataacaagaattttagttgtaagggacagcttaaatataattgagatctgtgaaaatgtattctgtctctatcaccttcagaacctgtgtatctcagttgaatgtataatttataaaaattattcttgttttaatttggtgtaatccagccatatccagtatcaacaaataagtctaagtaggctccttgacaaacttgaactggccacaagagagatcagatttcacctattaaaaaaccaaatcagaccacttacactgacagtctcttctgggagtcctcaaattaagaagtctatcctttgtgaaatattacactacccttgctagataaaacttttctaaaagtaccacttaatgaaaatctgtagacactaaatgcaatgaaaataaggcattgtttttttttctccccatttcagtgatcttggtatcctgggatattgtttttaaaattatcgttataattcctttgagaatttagtgaaaygttccctttaaccaacttaggaaaaattaatatctttgtacatgattttgagctgtaaaataaacattttaaactgggaataattggagtttagttaaagagataatgtatataaatatataacatagtagcagcatataattctgtcttacacaagatttttctgaatagtataaacagttatgtagcctatctaggagtttgtgaatagagtttaaaattttgttttgaagctgcaaatttgattagaaattaaacagtraagttattacttaaggaacttcgttttagctgtctgaacaacttactgtataaaaatctttaaacattctgtataaatatgtgataagatatgcaatgaccttaattttatagattagaaaataaaaacacactcattaatttacataactgacagattaagtgaaacttctcttctgatcacgttagcagaatgccaaatcttgtcgtggcactagaattagacggtagttttgataatacatgatttgactatagacatttgttgaaactattggtagttttaatcactcttgtaattttcaaactatctaacgggagaggattatccatcctgttttctagacaaactgtttcatctgaatgaaatatattcctagagataattatcactacttcatcttttggttttattttgcacatagaattatagttcacaatgactttctgaagctctaaagttgcagctgtgagcttctttggcctgtagggactgggaaaaagcacccccgtcctcccccaagcccccccaccaaaaaaagttaaagtgtttttaacaatagctgtgggctttttgtagtttcagaacttaggagttgcccaggctggaatgcagtggtgtgatcatagcttgatgcagccttgaactcctgggttcaagcaatcctcccacctcagcctccagagtagctgggaccacaggtgccaccccacccagctattttttttattttttaatttttttgtaggtatggggtctccccatgttgccctgcctgtctcaaactccagggctctcaggtgatacccaccacccttggcctcccaaagcacygagagtcactgtgccaggctgagtttaaaatttcttgagttggagtttatggctattttttccactagttattaaacatgtatttttgtataaggcactgtattacattttgtggggggattcaaagctaaattagatgagacgcatcatctattatggaagatgttacttaagaagaaatgagtgtaatgtagcagagaattagataagggacgtatgaatacatataaatgctgttgaagttctgaagagagagagtgtttagagaaattagaggagtctttgtgaagktatcactagaacttcctatttttgtggaatatatagtagattttggtgtgatactgtggatttggacattcactcagagaaggaatgagggaagaatggtggagaagaatggcattcacagtacaaaaagcaactgtgacttttaaagaagttaatatggagaagtggcaagtcttttcttctctcttctcttctcttctcttctctcttctttttcttttttctttttttctctgtcagatacygttgtaaagactttgcttttaccggaaactgatacgttgggtcatgtaccctggccagtcagttctctttattctaacacttagccgatcarttagatttccacattccatgatatgtcagttttggtgacccttatttttccacctggtttataaagggaaagaatgtgatatgtcacccaggctctggagtacagtggcatgatcataggtcacagcagcctcaaagtttccagttcaagcgatcctacytccttggcttcctgagtatgtggcactacaggtgcatgccaccatgcccagctaacttttttgtagagacagggtctccctatgtttcccaggctggtcttgaacccctgacctcaagtgatccgcccaccttggcttcccaagatattggcattacaggcatgagccactgtgccggcctgaaaatttctcttttgagatggcatcccacagaagtatacctgcttagagctaacactggtaaaaagactatttaaccctattgccttattttactgtagttgagattgagttaaactgaaagctgaatgacctgtcctaggtcatactgttactttgtgccagagtcaggatgagcaaatggatttcctgcctgctagtctagtgtcttttctatttattgtgctgtaacatacagttttaaatttgtatttttatgcccaatggacatggtagctcacacctgtaatttcagcacttttgggaagccgaggtggggggattgctcgagaccaggagttcaagatgagcctgggcaacatagcgagactccgtctctataaaaaaaaatttaaaaattagctgagtggtgatgtgtgtgcgtgtagtcctccttgtgggaggttgaggtgggaggatcgattgaatctaggaattcaggactgcagtgagccatgattacaccactgcactccagcctgggtgacagagcaataccctgtctcgaatgaatgaatgaatgaatgaatgaatgaatgaatgcccaaatccgtaagctatgttctgtatagcagctttttcatcataggcagtttttactcttatcagtggacaacctacaaaattaactaaacacttaarcaattaacagaggaggccttgttcagagtgagaaatcattaagcatttgttgttgaaatttcttactgtactctgttttaattctgtttttttttttttttaatgttacttgttttagtttggattcctagttgaaaagggaatatgattcctttaaaacaaagatactcygctttaaagcaaaggtatatcatcctcttcatggtgattgccatggaaacaagacaatgtaaatttattcaaatagtacacagtttttatagttattgatcatgaggggaagggacagttaatccctactgatcagataaaacctcattgtttcatactaataaatggtttttttatgcttatgaaaggaaaagccagaagkgtaatttttagtgtttagagagctagtgattctagttagggaacttaatacctttgaagttattagtttgcaagcaatagaatctactactaccaaggtgacccctagcagatgtagagtaccattaacaagtgttccagggaaggaaagccaactagataccaagtcatgctttttactcttagattaagaaattcaggttgagttaaaggatcagctgttaactaataaaaagcagattaatattacagagccaggctctgtcctggttatggacttaatcttcacagcatcctcaagagataaaaatgaatatacctgcatattagatgaggaaatagaagataagtaacttgccagagctatgacgtgaactcaggtaatgtagcttaagagcccccacatgtatgtatattgggtgtgtgtgtggagggggtgcgtgtgagtgcttgtgcatgcgtgtggtataataagaaaaaattagcatttatgcctgtaatcccagcactttgggagaccgaggcacgaggatctctcaaccccaggagttcaagaccagtctaggcaacatagcgagaccctacctctacaaaaaaagttttaaaaatattagcgggcatggtggaatacacctgtagtctcagctgcttgggacgctgaggtgggaggatccttgagtccaggagattgaggctacagtgagctatgatgacacctctgcactccagcttgggtgacaaagagagaccctgtctccaaaaaaaaaaattagaactagttatctggaggcctgtgttctagtcctagctttagtacggctacacagtgacacattaggctaccatttaacatctttgaacctctgataatttgttaacaatatgggtaaaaatgactaagataaatcaaagagctccagcattccctccagctctgaaattctatgatgttttatcttattttacttacaaaaataaattatattatgtatatttaaagtatacaatttgatgttatgggttacctatagtaaaatgattactataatgaaactaattaacatatccatcatcttatattgttaaccatttttttgtttttgtggcaaaagcagctgaaatccactcatttagcaggaatcccaaatacagttcagttgtattaattgtaattctcatgttgtacattcgatctctagacttgtttatgctacatatgtttgacttttaaacattctactcaaatcaaccctaagtcagggttagcacagacaggacttgttaacaaggtagaaggtgccacattgtacctgggtgtttatatttctctaaatcttgttctgatcatattttaataaatataatcatcaggacaccaaaattcattccttagctattaaaaaattctattctattttattgttaagatttaggagagcatggtacagattctcttaactatacctatcagaagcctatgttttaagtccaatgtataggcactgctctgtttgtctctggtgggaacttaccctgctttacctaatttcatcctrgcttcctttttgtgaaagatcacccttgcttagcctattttttggcaaatctacaccttggaaatagtagtaaatgacataagcatattaatatttatgatgtgatttatttttgttttcaagtcatatactggggaagattctcaaatattaaaacaatgtatctttacatttatgtatgtcgttcttgttctgttttagaaggcttgtatttgcatttttaacattccaaaaggtaaacctgtaatcataatgttttcatcaattcaataaaaccattacgtttgtaatagagagccctatagttgccttagttaagtttgctgcaactcattttatatattcttttaattttgatccctggatttttaattgattattaaaccttcattaggatatatatgaaatgtaaaaatattgagttataatctaccgttttctaaaattttatactgcatttttatatagaaattcaaattgctcataatcattctagtgaatttaagtagaaaggtatttattactaggtattaaatggcttataatattgttgacaaggttccactgcaaaatagttcaccaagggagctgtggcctcttctgtgatcaagaagccatctgtcaacttgggaagcttccactatagcacctaaccccagactacattgagtaggaagctgtaataatcaggaagcttctacctttgcatgctctgcaaaccaacgtgaacctgctgtaatttgtaaccacaaaatggatgcctgttgatacttacgaagctcatcattgtatgctgggttctttgctaatactttcttataaaaattaaatacctccacaatcatgcatgctagcagaaacagcagasgagtagccttagcctcacttcctgcttatacctgtcatgcaratatacagaacccagaaccctagctgaaagggagtttgagaactagtatttgtattgtcccagattctgcagtggaagaattcatagtggatggaagttagaatgacccttgaattacaatcggccacattcatcacaaatacattaaataagagtaatttgccataaagctctatgtttgtatacttctttgktttttttttttttttttttttttttttttgagacagggtctcactctgttgctcagtctgtagtgcagtggtgtcatcatagctcactgcagtcttgatctcctgagctcaaacgattctcctgcctcagctcctgcttcagcctcctgagtagcggaacaacaggtacacaccaccacactttgctaattttttattttttattttttgtagagatgtgggtctcactgtgttgcccaggatggtctcgaactcctgggcttaagtgatcctcccaaagtgttgggattacaggcatgaaccactgtgcctggcccatatactacatatatttaaaagtagtatttaaatgtgtaggatgaatgaaagaggcagtaagagaacaaagtgaatgaaaaagtatttctatatgaagtgaaagcaggagagtcctctctgttagagaacaacagaattgcatatgacagactagctttcttaatatttctagaacttgatggctgtgaagagcgtcccgtaggaattctcccttcacttaggaaaacatacctcaaaaccatcagctgtttagcatgcacctgcttttcctggtatatctcagtgaagcagctaaattgtaaatgattaagtaaactttgcagtgtatcatgtgcaaaagcacagtaaaaacaaaaatgcattggaagctgtgagttgttgcactgcactcatggatgaatagctgttggttcgcattgcgttkttttgttttgttttgttttgtttttttgagatggagtcttgctctgttgcccaggctggagtgcagtggcgtgatctcggctcactgcaagctctgcctcccagattcacgccatcctcctgcctcagcctcccgagcagctgggaccacaggtgcccgccacaacacctggctaattttttgtatttttagtagagacggggtttcaccatgttagccatgatggtctcaatctcctgacctcgtgatctgcctgccttggcctcccaaagtgctaggattacaggcatgccgcattgcgttttatataattctcatggttctagtctcgagctgtaggattttgatcactgtttcaaacaataatgtgagtttgctaagaggtctaaataacaaaagctaagtgttccaaacacatatccaaacctatacactgggcaatgcatctgaattatatgtgaaatttcctgccattatttaagacacaaaaggaacattattttgataatgtatttatttgtgagtggagtgttcagaatgagcacgatgggtataacatttttgtaggtttttaaagttgaaatttagtgtaaatccaaagaatcaatagacaagtctgtgttttacttaacctrtatgtttaaattagcatttttagatactgattttattcctaatttcagaattctcagcgtcttgccgatcaatatcgcaggcacagtttatttggcactggcaaggatcaaacagagagttggtggaaggctttttcccgtcagctgatcactgagggattcttggtagaagtttctcggtataacaaatttatgaagatttgcgcccttacgaaaaaggtaaayrgtgtaggagtctgcctgtttgacttaattttgtttcccactccacattaaaagatcctttttgcttttaatagggtagaaattggcttcataaagctaatacagaatctcagagcctcatccttcaagctaatgaagaattgtgtccaaagaagttkcttctgcctaggttcatttttcagtttttttcttgtaacttctgcattttttgttgctatttatgtgattcaaattataccagtttataggcctctcacaagtaaaatgaattrcctgtttgtttttgtatgcctattttagtcagtytgggggaagggatctgtgaggaaaggataagtcatagagcacttttcttttttaagagacagagtctctctgtgttgctcaagctggagtgcagtggtgcgatcatagcttactgcagcctcgatctcgtgggcccaagtaatcctcagccacctgagtagatgggactacagacatgcactactatgcccagctaatatattttaattttttgtatagagacagggtcttctagtgcttcctaggctggtcttgaactcctgagctcaagtgatcctcctgcctcagcctcccaaactactgggattacaggcatgatccaccgctcccagccagaacattttcttggttgatgggaagtagctgaccatggtatttagaaaacttctttctcatcgattaaagaagcagtactgaaatcaatgcggaggaatccatatatcatatttacttctggtgtgtagaagtggaaagggaatacatttgttgcttacttttttgtacctttacatgtgattgatcacttgtgagttttttctttcaaacatcttaaagcttccagagctttttctrgaaaaaaaaaycagttttaagaatcaccagttctaaaagggtaatatcttattcatctttctgagaatggagtatcatgattcatgaattagatacttgcatcttaacatttgaaataatttaattttattattttttagttygaaaactgtatcttcgggcaccaaagagcattgttataatcaagtaccagttgaattaagtacagagaagaaggtttgttttaaagaaattgttctgayttatttcattctttattgattcaaattctgtttaaaattttatattttaattcctttccaattaaagagaaaatggcatatataacaaagcataaaattcggccagggaagtgatgtgaacagactaaaatttattgtatataatttctggggctaataaagaattggaggtatttgagaaaggaattaatttgggttcttttaaacctatctgctaactcatttggcttagagtagtcacatgttataatacttatagttgatcaaaaaattgattcctaagtgttcttattaaagacacacaccacacacacacacacacacacacmttctctctctctctctctctcacacacacacacatgcacacacacttatgtactttcttgctttttttgacctaagatcttagataactattacagattaaatactaatccactggcagacttcagctaattagaacactggaataataggcaagcatagtgaattacattttctggtgaactttttctgctttattgaagtatgcagaatgtaaatgaattgtttttataactttggcacttgctgtatcttagaacattcttttgatgatttattttctgtagttttgggagagataagacattggaatgcgtttctaactacctttagaactttagaaactgataatttaggaggttattttcaggtgattaatttgacagcttgattaggcaaagaaaaaattgtgattttgagatttttgtttcttattttcttcacatttaaaagttttttgaaactttttttaatggacctttatatgtttaaatgcagtctaacttggagaagttatattcttataaaccatgtgataagatttcttctgggagtaacatttctaaaaaaaggtacagagttccatatttctatgttctatacttgctttatgagtacttttttttctaaagagaaagaactgtcagatgttgggctatttcattggcaaaaggaagttaaatttaaaacataagcttttcagtattagaatgatcaaagtgagctataaaagaataatgttaatttaatagctaacacttcttggatattactgtttgtcaggcattatgttaaatgctaagaactttatatgtgatatctcatttaattcttacaagagtctaacagctgttactatttatcgccattttatagttgaagataccaagggttaagaagttgacaaacttgttcaagagcatacagctaatggccgagctggctttcaagtctatatttgtctacctctagcatcaagacactatttatttttctttgtatgaaatatatacaggcatactttgttttattgtgcctggctttattgtgacttgcagatattgcatttcttataaattgaaggtttgtggcaaccctgcgtcaaacaggtcatattagccccattttccaatagcatgttctgttgtcatgtctttgtgttatattttggtagttcttgactggccattcaccatttctctccctctcctcgggtctccctgttccctgagatacaacaaaattgaaattaggccaattaataactctataatagtctctaagtgtgttttttttttttttcgagactgagtctcactctgttgttcaggctggagtgcagtagcacaatctcggctcactgcaatcttcgcctcccgggttcaagcgattctcctgtcttagcctcctgagtagctgggactacaggcgccccccgatcatgtctggctaatttttgtatttttagtagagatgggtttttgccgtgttggtcaggtggatcttgaactcctgaactcaggtgatccgcctgccttggcctcccaaagtgctgggattacaggtgtgagccgctgtgcctggcccatctctaagtgtttaagagaaaggaagattcacatgtctctcaatttaaatcaaaagctaaaagtgattaggcttagtgaggaagccatgtcgaaagctgagataggccaaaagctaggccccttgcaccaaacagttagtttgcaaaggcaaaagttcctgaaggaaattaaaaatgctaccccagtgaataaaacaatgataagaaagcaaagcaggctttttgctgatatggagaaagttttagtggtctttataggagattaaaccagccacaacattcccttgagccaaagcctaatccagagcaaagccctaactctcttcaattctctgaaagctgagagaggtgaggaagctgcagaataaaagtttgaggccagcagaggttggttcatgaggtttaaggaaagaagccatctccataacataaaagtgcaaagtgaaacagcaagtgctggtatagaagctgtagcaagttatccagaagatctagctaagatcatcgatgaaggtgcctgcactaacagactttgaatgtagaccaaatgctttctaccagaagaagaagctgtctagtactttcatagctagagagaagtcaatgcctggcttcaaagcttcaaaggacaagctgactctcttgttagaagctgatgcagctggtgactttaagttgaagccagtgctcaattagcattctgaaaatcctagggcccttaagaattatgctatatctactctgcctttgctacatacatgtaacaacaaagtcttgatgatacctgtttacagcatggtttcctgaatactttaagcccattgttgaaacctgcttagacaaaagattcctttcaaaatgttattgctcattgacaacacttagtcaccaagagccgtaatggagacatacaaggagactaacgttgttttcatgcctgctygcttaacatccattctgtagctcatggatcaagaagtaaattaaccttttaagtattattatttaagaaatacagtttgtaatgctttagcttctgtagatagtgattatcagagatgggtttttaagaggttttccagaaaaccttctggaaaatattcactattctagaagtcatgaagaatatttgtgattcaggagagtaggtcagaatatcaatattaataggaatttggaagaagtcgattcttattaaaatcaagagtttagtgatagacatactgagtttgggatacctgtggagtagtccagaagttaatttaaatatatgggcttagtgtacagaagtgagcagggtgcttatatatgaataaatattattttaagatatatttaaattttccttaaaataatacctatacttgatataaaaagttaattggaaattagtggcttatgacaagcataccagcccacactcttcccaaacccactttgctcttattcatagaagctgtcatcttcaaatcttccagctgatttccctggcgtgtgccttcttatttctgaatgacacgcttagagtactatttttttgacttagcaattttagaaattttctactcatctcctattatggtagatttcccctccttcattcctcctccaatataattatatttcgtcatattaataatttgtttatatatatttttaatataatatgataatattgtatttatattattaaaactacacaaatattatatacacactactaacccaaccgtgttattatggccaccactacctttatttttttccttgtgttagtgattgtctttgttttattttcttggttttgagtattccttttactaattttcttttttcctatttcaatctctcattatttgtttactcatttggagtgttccttgacttttatcccctcttacctagtgacattttaattttagttatcaaatttttaatttctaagaatgcttcttgttctcttcttgtttcttcttccccaccagccaaaaatctatgatgttatagcaaggatcatacattgtttcccagtaggttaagaaaccttggttaaaacctgttgtatcccagtaagttaaaagacgttaacgtgtcatcttcagtatggatgaaagaatattttctttcaaaagcagttggttgaggaagagaatgggacaaatgctctttttaaaacaccaattttgtgatgaactcaaattgcaattttaactttaccattataatgaatgtatttgatccaaaatgtttaaaatctaggctgttgtcatttaaataacaaattaccttactggtatcatgaagaataaatgtttgtactgatttggaaagacattctcatttaggggatgaaatagaaagtcaatgaggagaaagaaaagcttttattatttattttcttttaaatatttyagtatcatggtacagtcaccagaaaaagcttacagttcctcacagcctgttatttcggcacaagagcaggagactcaggtaaggcttttgtaaaaaggtaattagtttatgataggatagttatgattctatgtatgcttaaaattctgtattttgccagcattttaaaaattgttcttaagctaagagtctgagtttatatttcagtttatattcattctaaggaaaaatgtggtatctgaagctctaaaaataaaggactagatcttttaagtacactttaaaaagtgttgtttctttgttttttgttcagattgtgttatatggcaaattggtagaagctaggcagaaacatgccaataaaatggatgttcccccagctattctggcaacaaacaagatactggtggatatggccaaaatgaggtaaactatcttttgcatgtgttctcatttatttccttctaacaaaatagatttggaaaatatatctaagttgataatatgaccatagcttccactgtcacatctgggaggtgactcagattccccctgctgcgatgcttatctctttgccaagctttagtaccgtgtttctgtatgaataaaaaccagttacgttttcagcaatcatattcaatatttataaaatctaactcattatttacccaccctgcattttatccaaatgccgaaactcctctttttggattctttatttttgattatcttaccatcacatttgtagtcagaggttcctaatgcttaaaacctctgatctgaattttctctcctccaatataaaaccccttcgtcttcctcttcttcttcttcatttttttttttttttttgtctgaagacttgtctcactgtgttgcccaggctggagtgtagtggtgcgatcactgctcactgcagccttgaccccctggactcaagctatcctcgcacctcagcctcccgagtagctgggactacagaacatgccaccatgctcagctaatttttgtattttttgtagagacagggttttgccatattgcctaggctggtcttgaactcctaagctcaagcartcttcccgcctcagtctccaaagttctggcactacaggtgtgagccactgtgcctggcctctttttctcatttaaatacttttcataccttttgtaaaacgggttccttgttgcctgtctatgccttcctcctccttcttaatgacaccacgttaattctgactgttttcccttggcctgttgcagaagcctcttaactattaacccttcattctctctctctgtttcatctgatatatgagtaccaaactaaatcttcctttatcatatcttacttctgcttaaatgttttttttctagcttagaattcaaggccctctatttatgaacttaaacttacttttccctctaagttacagaatttgaaatggtttatcttacctggattgtttatcacttgttgaagatccattttcaacttccatatatttatttacagtgttgcttctccttgtagtttccttgattcctcaaaactccttttaagaattcttgaagatctcgctttattactatttctcgctttattactgtaaagactatgagaaggtctttcatgatcttatcagcaaagtaattcctctctcttgaattcatagaggactttcagatgaattctaaagatgcttctgtagcacttaccacacaatgctatattttatttttttgtaattagtggtaaacaagtattattatatcttctagattttaaactccaaataaagatactagctccttacctttttgtgtgtctcctgtagcacctagcacaatgcctcataaacaggaggtgatcattaaatatttagaagaaattatttcccaagaatagttgcttggtaattgtatttgtcttttacttccttttaaaaaattgtttctgtcactaaattgcatccaatagatgttacttgagtgcagaattttctaatgacattacacagtgctacatctgacactaattcttttgttaaaaaataaatattctggccgggcgctgtggctcacgcttgtaaatcccaggactttgggaggccgaggcgggcggatcacgaggttaggagatcgaggccatcctggctaacacggtgaaaccccgtttctactaaaaatacaaaaaattagccgggcgtggtggcgggtgcctgtagtcccagttactctggcggctgaggcaggagaatggcgtgaacccgggaggcggagcttgcagtgagcggagatcgcgccactgcactccagcctgggtgacagagctnnnnnnnnnnnnnnnnnnnnactccgtctcaaaaaaaaataaaaaataaaaataaataaatattctaagaccatactttaatggaggtgttttttgtttttttttgttttttttttttttttttggtgatagagttctcactctgtcacctaggctagagtgcagtggcgcgatcctctggctcactgcaacctccgcctcctgggtgcaagccattatcctgcctcagcctccggaatagctgggactacaggtgcgcgctgccacccccggctaattttttgtattttagtagagatgaggtttcactgtgttgtccaggctggtgttgaactcctgagctcaggcaatccacccgccccggcctcccaaattgttgggattacaggcgtgagccacagtgcctggcccagaggagatatttaatgaaaaataataatcattagataggcagatttttagaaggagggcatcgaatgggttcttggatattggacacaataagaaatattgagctaaaagtctgaaggaattggcagatatactgttacaggtaaacactttgtagaagaaaataatgaatgagactttcttttgagattttcttagcctcttagttgttcccagttaaagcctcatatttttccttttcatgacaataaaaataataataaaatcagtaataaagtgaatatatgagatgttaacctgttcctttatgacaatgtcctgtttaccaattaacagtgtgtttttgtggtgatgggggcaagacaaatctttaaatggtggaaagcaragaaagaaattataaaacatgattagttgtattatacgttgtttttgkttgttggaaaaactatacatttattgagagaatcattaggaagctgaacatcagctatattgctggagtgatactgtttcagtggtttcttgacctttttgttgttgttgttgttgttgttaaacacagaccaactacggttgaaaacgtaaaaaggattgatggtgtttctgaaggcaaagctgccatgttggcccctctgttggaagtcatcaaacatttctgccaaacaaatagtgttcaggtaaaatactgtggtttgcaggagctcttagagaataagcattttttgtaaccatttcaaaagtaccctccagaagcaacatttgctcactttatttgcatttccatactggacacttagaaaatgaattaaaattgtttttacagtcaatctgttgtaaaaacatgtcagttatctacttttaaagatgatactaaaaagtagttgtccaggctgctgatgtctttctatttcattgggaggttttgtttttaaattggaaacattattttaggttgataaattataattttacattcaaatgtggtagttggaatttaaagctggaaagttatccttgctatgagttggtcaggagctcagccactttcttttggtttagcatcttctctaatctccctccccttccagtaatgctgtcttttgatagtaagtggatttcatattattctcttcagttttaatagtgtttccttcatatccttttattattgcttgttctgccctaagtgaccatttccagaaatgtcatttaggattttctctaaactccacgtagcagactctataatgcatactctgcagaaggtgaggcagtgggaggtagaggggagactactagactaggagtcacggaatcaggactttagttcttccttacagttgttcacctggtgaacctgcacatgtcctttaatttccttgggtctccatttcctcagctatacaatggaaatgacacttcctcccccacatccaggaaacaacagatgacattagaaaatagaagacatgggataagtataaaatgttgaaagagttaaacacattcaaggcaatattaagggattattttttacttccaagaagctcctggaagctttgggcaggcacagttggatcctactttagaaaaatctttctctaactataagtagaaaacccttctgctttttgaatgtagcatttccctcttttgatatagagtatctttggcaactttgaattttctttttcatactcttatataagacatcatgtgaaaattcttatttcttactgagtttttggaaatgaaattataatgtcttaatagtttgagaaagaatatcatacctaccagcggtaattgagtaagttccctctctttggacacttgaaagtagtatcttctttcatgaattagtgatattatttaataatgaatgagtgatctctcctaactccccttcagaagaggaaaatgaagtaggggaaaaggtaaattccccaagggataggtatgaaacctttatgaaccttctggatagagaagatgactgctgatttctgtgattagaaattatacttgggttattctgcaaattgaaatgaattatttwaaaaaaaacaactttaatgtttattaagcaagttttgttattcatgagtttcattagcctttwattttttttttaaattttgaagtaaaatttcttgctgtcacaatacacattaaaaattacaaatatgacacatattaaacacattaagatggccgaataggaaaaatatgctaaaatatttttatataaatacattttttgagaattttgagaatttctggaacaaagtaatgatataatccataaatgtacaattaaagagtttaaggatatccaaaatacttggcaaagtaatctgaaataatactcttaggaaggtagggcaagaatgtgattctagtaagcaaaaatgtratcaaatcgtattctagtcccagctactcgggaggctgaggcaggagaatggcgtgaacctgggaggcggagcttggagtaagccgagatcgtgccactgcactccagcctgggcgacagagcgagactccatctcaaaaaaaaaaaaagactatatgaacwtgtatggcataaatatgtacaaatattatttattttaaaaaaattcaggggtagggacagggtagttagaaaatatctaaggatgttcatgaaataatactggctatgaatgacagttgatgaaaccgggtggtgcccatcttattccctcgactcgtgtatatgtttgatatatcccacaataaaccttaaaaaaaaaaagatgagtggtcaattataggaagatataaatagaaaaggcaataaggacaaaagttggcaaagcttacctaagcactcttcagataaaaagacatttttgctaactagatttgaatattatagtttaattgtcaaggaaaatgcctcaacttaatctttgttaagagactacttaaggcactatcagaagttccctcatggcaaggtgcaatccctcatgcctgtaatcccagcactttgggaggccaaggcaggcaggttacctgaggccaggagttagaaaacaacctgggaaacatagtgagacccgacctctacaaaaacaatttcttaaaattagccaggcatggtggtgctagcctgtaatcccagctatttaggatgcttaggcaggaggattgcttgarcccggggatttgaggctgcagtgagccatcattgtgccacaatactccagcctgagtgatagaaaaaaaaaaaaaaagtgtctttgttatattccaaacttgttctcaactttcaggtgagctggcttcctgtataactcttgtataggacagaacatactggttggggcaagtgaaactgtctagttgtatgcctcataaattaatgaatttcctttctaatatatacactgatatttatacacacatacacataaaaccaagctcaatagatgggtagtgcagctctattccccaaaacccaactaccctgtaacaagacacattagacttttgagattgcaaggatgaggactgaaatgctggcctagaccatggtgttgccatagtggggtgaccagtctgaatagccaacaatgcttcctcagtaaatacccattttgtcttggtgggatttctayaaattgcaaaatgcagctattatgaagctgtaaaagagaaacagaaacatgtaacacctgggactgttttattaggcccaccgtatgctcagaacatgaaatctccactgctagggttatttgattgaaattatcttttgtgttgatgtgagagtttagctctgagattcttccacatgtaaaatgtaatcccccaaagtatttggcaagcacattttattgccttggstcagataattgaaacattaggcatcatatatatagcatgtaaaaagtaaaacagaaacatttatgtttctcaccaagcagtaaattagtactcaactaataaatttcttaaactccctaataacagaatatggaaacaaaaaataaatctttccaaaagaagagctcatggacacatttcctcatatatgtatacataatatagtagaacacatgataaataacctataaaaatgataccaatatcattcatcaagagacgaggctcttctttaaattattaatttcatctgttacaggttttattatgactgtagtatgctgttttcatctaccttttatgtgtagttaaaaaaatagttttctatctctttacctttatttcagcctttaaaaagattccattattttttcattaatcttgtttttcagtttttcccattttttcttttaaacatttcttaaggaaccatatttaagattttatagaatacttagatttctagttgggatgtatcatttaaaattagatatgtagagagagtgttatgatatatttccttacgatatattagtggttatagtacctaaatttgaatagtgattctgttcattcattcattcattcattcaatattcacttccaggagattggggacttatttaaagacagagtagttcacattatagttcctttttttagtccttcttattcgttaaagaaaagactaggaaatgtttgttattacaaatattttattaaaattttgtgtgctctagcattattttaccttttaaaatcaatatgttaaaaatccaacttctttttgagctccccataaaaagggaattatttgttgcttatgggtttaacttgtgttatttttttcttaatggctaattatcatacatatattctattattgtattgatattactgatcatttgtgctacattaaaaattctgtagacagacctcttttcaagtacaaaacctcaagaagaacagaagacgagtctggtagcaaaaaataaaatatgcacactttcacagtctatggccatcacatactctttattccaagaaaagaagatgcctttggtaagtgtgactttcatgttacagggaatttttttagtttacttaaacttgtgttttatcagctttttagtattaaagttctgacttgggatcaatttcctccaaccctacaataaatctcagtttatctttaattttaaaagagaatgttgttttctttttctgttaagcctccctgttaagtaatagcagcaagtttagtttggccatgaatatcttctagagattgtatcggggtactgataaacacatttrtagctcagggatactgcatcagccatattttaaaatgggactaacagtttaaaaactataaatattcacagtgttaagaaacaatctcaagatgcattaagaaaaaggaaggtgcaaaacagaaaaacaaacgtaaacgtgtgtgcatatgcatgcttatatagtcacatattcttgtatgtgtacaaaaaatacacactggatctctgcaagcatagccaagcaactggaaatatgtttttaaaaacttgcttttcattctrtctcttctagtactgttttgatgctctttgaaaacaatctaattgctgtaacaaatgaccatacgtaggccgggtgtggtggctcatgcctgtaatcccagcacttcgggaggctgaggcaggcagatcatttgaggccagggatttgagaccagttggacaacatagggagaccctgtctttactaaaaatacaaaaattagctgggcgtagtgacgcatgcctgtaatcccagatacttgggaggcggagacatgggacttgcatgaacccaggaggcagaggttgcagtgagctgagattgcgacactgcattccaacctgggcgaccgagcaagackcggtctccaaaaaaaaaaaaaaaaaagaccatatgtaatgtttcttcattgttctaagataaatctttaaggctgttgaggttttttgtatacaaaatggagagtaagttttaatgggatgggacaaaatgaggcttacagttgagtttaatttgagttcacatcctgttgacattaagttgatttggaacaagtgatatggtccaatgcctgcttttctattgtctgtggttccatccactagtgcctgtgttacacacctcttgttcaggttttatcatttaaaataaataagaataaacagtccatagcttatcttacttactgaataaatgctctratttgacagtcatgtttcttaaagttccttacaaaggccattgcccaagaaaccaaataattccattatactatttttgaaatagaacacataataaatgggaattttaagttcagtttcttatgtaaacaataacttctatgtacatgttaaatatgcctgtatatacctaatttgaccatgtatgtatagtagaaatgaaaacagttactaagaaaatttgttattggctccaaattttctgaattaagtgtattctaatgctcagccataatatggggtttcatgtgttagtttatgtattcatggttaaaaatgtgaagactgttatatcttcatttgtgtcttttggtattatttggttgtattttattgtgtgatatggtggtataattatccttacctcccaggagtttgagagggtcttgccagttaaccgcagaattaaacatgcytaggactaattaatcaggagcaatactacaattarttggaggtaatttgaaacctggtttcaaataaccctgatattatgcacacatggtgcacacttttctagtagacatttaatgaaagtaatttaaaacctacctttgaaggatgaaaaacattgccttaaatgctctattctgtgaaagtatcaacatttatgcaaatacagtctaaattcagactttgaaaatgtattgaaagagaggatcatgaaataagttagagctgagtgacaaagctttctgagtgtttaaaagaatgttttacctaataaatatctgaaatgtatttggagccacatttgtttaaagaactgtataaatatgtagcactgttcatgtgaagttcaatagtaggaaaatgctgacagcccttgtggaactgtggttattattattttatgaatagagccaatttcaaacacctattagagtcttctcaggaacattttatagaatgcatctggagccttatgttatctctaagcattttaggatttgtcttcttggaaattcatgtaaccaaaccaccatgtgttatttcaagtgtatatagtattgggttacagtttactatgttttcagaaggttgtgacaactattagacttacagagaatgacttctctgccactaacggctttctaaagtgaatagagaggggcgaggattgaattcttcggtaaagctgggtgattttgttttattcaatacagtataataagtataaaaagtagaacctatagagagctrtaatgggggtagttttaaagaaattctgaaaatgaaaaacttaagtaaaggtttagttcattgtttatttcacactgagcatttactacctgaatgttttggacattttatttccatgactgragtggacacttttacaactcactgggttctttgctgrtctttctctagaagagcatagctgagagcaggattctgcctctcatgacaattggcatgcacttatcccaagcggtgaaagctggctgcccccttgatttggagcgagcaggcctgactccagaggttcagaagattattgctgatgttatccgaaaccctcccgtcaactcaggtgagaggcatggcctagctctgcacccttaatgacttgatgaagtaaacaagcaatccactatatttttcactgttaacagcattaatcctttatgctattatgaaaaccttacttttgtgattctttttcttgttttaggaaaacaatctttcttcccattatcactcagaggaaagtatactgagaaatttttttgttttgttttgttttttgagacagagtcttgctctcttgtctaggctggagtgcagtggcgtgatcttggctcgctgcaacctctatctcccaggttcaagtgattctcttgcctcagcttcctgagtagctgggactacaggcgtgtgccaccatgcccagctaytttttgtattttttgatagagacagggttttccatgttggctaggcaggtctcgaactcctgacctctgatgatccgcccacctcagcctcccaaagtgctgcgattacaggtgtgagccatggcacctggccaatacactgagaaatttttattttccttttcagcttaaggttacaacttccccaccatccaaaacgtgcactttcattttttttctaatttctatctcatcacttgcaaaaaccatatttttctccacattcattcccagtagcttcctgactcctagttcttccctaaatccttctgagtccttgtcattggtttcgcttgagtagcctttctaatcaacacagtcattggtatcagttactgtgacatggaagggacagaccaagttctgtgggccgctacgtagaaggatttcctgtcactttgctgcagaacctcagctcgcggagagcaagcccctttgcttgccctgtagaaatattttaaattattatcctttttttttttaacagaagtaaataggagatacgttagaggattttctctcctagatgtgtaaatacaaacttggggtcttataactcaataaatctgataaatttcttttgactgttaggatagagcagtggccataccaatagcctcatctccaaagctgcagtgaagatactttttactaccttaaagtctttcccatttgtgaacaacttgtgaacaattccccccaagaatttggaagatcactctctgaaagcacagtcaatactgtacttaaatggatctgagcaaaaataagtcacttagaagacaggattatttctagacttgagtgtgacttgactgaaggtctaaagaacaaacagctccttcacttccattgatcacggtggaagcacagggaaaggacagacacggaggcaagttggagtagtgctcatctaagttccagggatgcgggggagtggccaggggacttcaggtatagtaaataaataacctatttataagttatgtcaatgtcatgtttgaaatagaaaaccaaatactgcatgttcttacttacaagcaggagctaaagttggtgcatatggatataaaaatgagaacaggccgggcgtggtggcttgtgtctgtaatcccagcactttgggagacctagatggaaggattgcttgagctcaggagttcaagaccagcctgagcaacatagtgtgacccccatctctacaaaaaataagaaaattagccagacgtggtggcatatacctatagtctcagctacttgggagtctgagtcaggaggagtgcttgagctcaggagtttggggttataataagctgtgatcatgccactgtgctccagcctgagtgacacccagagtgagaacctgtctcaaaaggagaaaaaaaaaaaagtaacagtagacgctgggractactgaggggagggaaggaacaatggttgaaaaggtgggaagggacagtggttgaaaaactacgtgttgggtactatgctcactatctgggtgatgggatcaattgtacctcaaacctcagcatcctgcaatatactaatgttacaaacctgcccatgtactacctgaatctaaagtaaaagttataatttaaaaaaattataataaaatcagaaaataaaggtctgagatggaaaattaaaagaccaaagccacccataagcacaataaatccctccycccaaaaaattatatctattaaaaaaaggtgttgcgccaggcactgtggctcatgcctataatcctagcactttgggaggccaagacgggcagatgacttgacttgaggtcaggagttcaagaccagcctggccaacatggtgaaaccctgtctctactgaaaatacaaaaattagccagcagtggtggcatgcgcctgtaatcccagctactcaggagactgaggcaggagaatcgcttgaactggggaggcggaggttgcagtgagccgagatcatgccactgcacttcagcctgggtgacagagtgagactctgtctcaaaaaaaaaaaaaaaaaaagaccttgtaccctgacaagttttagtttgtgcaggaatgacacaatctagaatgactcaagattggaaaaatctttaaatgttaattacacaataagggtaaaaggagaaaaattacctaatgtcatctgagcaacaagaagaagaaatgaaaggcattaaaaattgggaaaaatttatatttgacagtatcttaacaacgaattctgcttctatatcacttcctagctttctgatgataacttcccgtgcagatctgtatgtaaggaatggacgtagtagtcatgctaatctgagtatttatctgtgtgatacttacgaattaacgatgtaagttaataagttagcatttcgtgaacctggttaataccatttgctaaggttaaattagccaaatcctgaagtaagctgtaaaacatccaaggtagggtagagaggcatcttatgagaaagctggccaactctcctggtcaccttctaatcttcctaacttcagaaatcaaggcagagagaggaaaatagtaattactttgtaggattagatttatggttgtcgaaacctttgtttctccagtgcagaatgagatagcgttttagggaaagccaaagactcagatgtcttcttcatgctcatcgtgtggaatttttcttcctttagaaatgtattgtctctcagggcttaaagcaatttgcatctttcgatgagacattgagtaataggcaatattctctgaaataatttgtgcaggctgggcacagtggctcacacctgtaatcccagcactttgggaggccgaggcgggcaggtcactgaggtcaggtgttggagacgagcctgaccaacatggtgaaaccccgtctctactaaaaataccaaaattagctgggcttggtggcacacacctgtaatcccagctacttgggaggctgaggcaggagaattgcttgaacccccatggraggtggaggttgtggtgagccaagattgtgtcattgtactacagtctggacaacagagtgagactctgtctcaaaaaaaaaaaaatagaatttgtgcagttccccccacccccttttttttttctgttggcatttttgctatcatttagctgccttctttatatcctgaaacttacaggtggtgttggtctagtcagtaagagcaaaggctttgggaatagatagatctgtatttagaccttggctctagcatctcattgttatgtgacctccatcaagtgacctaatttccctaatattcaatttcctcatctctaagacagggagttaatattgcctctcttatagaattgtgagaaatatagtcatgtgtcgcttgatgatggggatgaattctgagaaatgtgttgttgggcgatttcattttgtgggaacctcacagggtggacttaaacaaacctagatggtatggcctactacacacctaggctgtacggtatagctcctgtcttcaaacctgtacagcatgtgactttactgaacactgtaggcaattataacacagtggtatttgtatatataaacatagtgaaacatagaaaaggcccagtagaaatacagtgtaaaagattttttaaaaaagctgggcatggtggctcacgcctgtaatcccagcactttgggaggccgaggcaggcagatcacttgaggtcaggagttcaagaccagcctggccaacatgatgaaactccgtttctactaaaagtacaaaaattagctgggcgtggtgttgggtgcctgtaatcccagctaytcaggaggctgaggcaggagaattgcttgaacccaggaggtggaggttgcagtgagtcaagattgtgccactgcacttcagcctgggagacagagcgagactctgtctcaaaaaaaaaaaaaaaaaaaagagataaaaaggtacatctgtacagggcacttaccacgaatggagcttgcaccctgggagttgctctgggtaagtcagtgagtgagcggtgagtgaatgtgaagacctaggactgtgcactgctgtagactttataaaccctgtgcacttaggccacactcacccctgtgatacgagtctacctactgtataacgtacctgcatatgtacccttgaaactaaaataaaagttaaaaaatttatcttcttttgccaataataaattaaccttagcttactgtaatgattyttctttatgaattaaaatctttttactcttttgtaataacacttggcttaaaacacaaacatattgtacagctatacaaatatattttctttatatccttcttctctaagattttttctgtttttgattttgttaaatttgtttttactttttacattttttttgttaaaaaccaagacaaaaacccacacatcagcctaggcctacatgggctcaggatcatcagtctcactatcttccacctccacatcttgtcccaccaggtcttcaggggcagtcatatgcatggggctgtcatctcctgtgataacaatgccttcttctggacacctccagaagggcctgcgtgttttacagtgaacttctaaaaaataataaaatgtatagtatagcaaacacataaacatagtaacatagtcatttattatcattttcaagtattatatactgtacataattgtacatgctagacttttacacagctggcagcaaggtgartttgtttacaccattaccaccacaaacacatgggtgatgctttgcattgtgatgttacgatggcatgatgtcactaggtggtaggaacttttcagctccatgataatctaatggatacttgttcctgttggctgcccgtcgttgactgcaacatcattatgtggtgcatgactgtaaattagatactgttcagaaagctttggcacactggtaatagcaaatggtggtggcaaatatgatgatgatgatgatgatgattgaagacatagatggtaaaattttatggtgtcttaaaagtaccctctaaatatgattatttttatagtctgtccttttgaataggcacttaagaatgtatgaacttaataagtatataagaaagaatgttccccaaaatatatcttacagaggcatacaatttaagaattcaaacaggttgtaatggggtgtgtgtgtgtgtgcacacgcgcacgcatgcgtgctcattcacactaaagaattcttgggcatatgttcctgaatgtcctaaatggacattctaacatcacttcattatgggcagagggaaatggtaaagaaaaatttcatattatattattcagccacatattgacagcatctgttttatttgcctatggtaaagaattgaagcactgttaatttgctttttaaatcatgtaggcacaaagttatcgaactttagatttagaaatgaaactggaaatcattacactttccctttcctatccccaccctgttttggagagaaagagtgtgaggcttagagagttataaaactgttttaataccatgtctaagattaataactgaacaagtttctctttttactcgtgttaaagttgtactgccaattaacttaaaagaaagaaatatgcaatttctaatcctgatataggatatgggtatataaactctaacttgatgagtgaaacaaattaacttatttataatcagtttcatatctttatttattgagtgtctttaaataccccttacctttaaagtaagaaatattaaaatcaagcagaatataataatgaaaaattcttaagatatacttactaaaaacttatcsttcggttaatacactgtatgtaggttgtacatacaatatgaaaaagtatatttttgtagcctacttttaaatccagaatagaggaggttaagaaggttgtgataaccatgagctctttttttttttttttgrgacaaggtcttactctgtttcccaggctggagtgccgtggcacaatcatagcttactgcagccttgaactcttgggctcaagcaagccttccacttcagccttccaagtagctgggaccacacctggctaatttttaagtatttttgtagagatgagttctcactacattgcccaggctagtcttgaacccctagccttaagcgatcctcccacctcagcctgcctaagtgctgggattacaggtgtgagccactgagcccagccctcttttatttcttttgatagtacactcataatcattaaactatcatttctggatgtgagattgtgcttttggattcttattttttctttataaaatactttttgttctcttactggagaaaacattgttggattataaatgatataacaaggaatgaggatatacatactataataacgattcagatatgttattttcatattttatttaactgtagccatgccacaataatttagagttttaaagaacaagtttgattgaaatctaaactttgtacaatcctgaattgagaagtttcctgtattttattatgacacaatatttacctaaaaatagrgtaattatgaattgagaaaacatagctattaatttcatactcttatttgttaagtagattttgtctggaaaactgttcatatttaaaggagctttgtacctttgtattctttttgtttttccttgtttatataattttaaactctgtttatggatttgggattctaactatgctaaataataaattaaggcattgaatgaagtacctagacagtattttgattaattttattcccccattcttaatgtgcatgtaactggaaaattaagagtggcttccaagggatctactacaaaagtaaggttaatatgatctcttttaaaacactgaaggcgtgtagccagtgttgtcattaattctgcagtagatattttcagcacttatttacatgggaagttagagcagagtaagatgcacctgtaaagctaaatgccacttatttgcatatatataaaacgcaggatgaatttaccatagaaatataaagggtacttatagaaatgtattagaaaaatatatgaatttttaacttatatctagaagttaactttatacatttaactttaaatcattaatagtggtttaacaccataagcggatgtttatgcatcatcattttatgaacaaaagacattctaattttagaaataaagtgattcaaaagagaataaaatatcttactttttcttttaaaattaatttgtttagcgcattacatgataatagctcaagcttgtgtgatttttccctaaaaaattggtttataaatattacatttatagtatgaagaaattaatcatacatagtttatttatctaatttctaaatacccatggaagaaaatgaatttaatggaatgtagttgtgtattacttggtttcgagtgtgggaaaatttatatggtctttctaaaacagcactgtcagtagaaatacaatgtgagctacatatgcaattttaaattttctagtagccacattttaaaaagtaaatggatgcaatttattttgataatataatttaattagtctactatatttaaaattttatcatttcaacatgtaatcaatatgaaaattattaatgagatattttacatacttttttctgtaataagcctttgtaatcaggtatgtactttatatatacaacaaatcttctgatgctaaattttaactggaaatacttgatctgtgtttagcttttgtaaaatttactgttgaacaacgtggactaatgtgcctaagtggttccaaacatattttaaaatttgaagacaaataaaagggaactcaaagtaaattgggatacatacatacaacagaatactgagccattaaaaaatgatgaaatagtaaaattgggggaattttgatgatactaggatgatataatgaccaagagacaaatacaattttagtttggttgagagatgtgatcatcacgttgctgattttactatgtatagaggttatcttttcctttctaagattttgaaactttaattagttaacccacttacctagtttctattagctgtgtaactttctcttcctgttttttgttttgttttgttttgttttttgctttttaactgcagtattttgaggagtcttggagtagcaagctaatctttggaagaaaggaaaatataaacctgaaaactaayaatttaaagaacgtcttttcaggttrtcatttgaaaaatacttgatttctgatcactgatttgaattgagtgtcaaatatttgatatgttttgtaaattaggtgaagatgagtgagtaggttctaaactgcttgggtttaccgcactctggagcattgcagragaatgtgatgttggaaggaagtgctgaaacataattattggcttgcctataggagggtgctacataattttagaaggtgtcaagaaaktgacacagtctgaattagttctgttgagttgcaaaaaatgtaaagtttcttgattctgaaaataagaaatatgttcccagaaatctcatctagttaatgtgcttttaaaatcattgatgtctcttgttattacaataatagccattgaaagaatcttttttattagaatgttatttacaggtacgattagcttctatttaaataaattatttttatacttgatcttaggcaaaaggccaacaagtgatcagaataaattattttaagagaaaactaattataattgatatttggaattggaagcacaatttcctttagaacaattccacgaatggttgttttgattctcaaggcagcccacaaaagacagtttgaaacacaatttatgcagtgtcaatagtactgacctgactttggatcttggaggcaggggcttcaggtgatacccgagtggagtttttactccatttccattccgtaaggctataggcatttgaaagaggaaacttttctttggcaaccttccaccttyctttctacagaatatttcagtatttctagctcataggttttctaaaatattctctgtaatttattttgaaatggagtttttttatcgtttacagatatgagtaaaattagcctaatcagaatgttagttcctgaaaacattgacacgtaccttatccacatggcaattgagatccttaaacatggtcctgacagyggacttcaaccttcaygtgatgtcaacaaaaggagatgttttcccggttctgaagagatctgttcaagttctaagagaagcaaggaagaagtaggcatcaatactgaggtattaattatatatagaattttcataaagtgtcagtttgttcaatttgcatatcctagtactagaatgctgtatttttttgaactgttatgaattctgatatgattactttctctatgtgctacatttcctttgcttttcataaatatgatctgagaaaagtgattaaaaaaaagacagtaaaagggaggtttagtccatctgtttagcttattatgtagaatgtcagcttaaattttacctgtacctcatattgaccgtatagcctggaaaatctttcggaggtatagttaatggatttaagcatatggcagtttatgtagttaatgaaagtgaaaacaaattgtattataaatacctcccaaactggtttattatcattctatcattcttcatgctctgttagtatgatattgaatatctgaggtaccaggattattgttgcttgtggctctgagcatttcgtagtgcttttgcatgatgagagaaagattacaaatttagtattatgttagatggtacgttttattaaaatcaaatgcttcaaaaataattgctctgtgtatggcatgagataaatagcaatcagatatattrtttaataatatgactctattaaatgatggcataaatttgaaaatttgaccttcggtatcttccgggtctaaaattatatgactccattataaatattttggaaatgattaactaaaaaattgtttcaattcttagttggtaaattcaatgtggtagtaggtggtggtgattattttgtattagagaattaggaattacacttagttctaaggtaatctttataggatgtccagcaattaaacccctacttttttgaattgcttaaaaataagggaactgatctttttaaattctgtacttgagttacgtctgtatatatagtcatgtcctagataatctaatggaacttaattagttggaaatctttatattgtttataactgaactagctataagaggaacattaaagaaaacatattttgagtggaggtaatgaaatttagcttctaatgctcagccttttatttctgtaatctataccagatacctaagaccctcttattgtttcccagcttcaacctgtcagtatagaaaacggtgtaacttactattttttctcaatattgaagcacatttgtagtgaaatattattttaactatatattgccatttttgctttttccctatttcagtaacatttttcgctatttcagtaacattacatgtcaacaagagaatggtgggtattttggggggggttgggtgggragaaattttactaagcttgctagattctaaaaggtataccttatttggccccttttccccatttaggggaacaagggtgttggggctgggaagtagataagaggtgagtaagtcatccaaagcatatgtcttcattagcctccctgtatgaaaagctgatttctgtagagtgttggaggcctactttcagaatctgtcatatgttaacattcatcttctctactgacctgatttatatcccttagtctatttcattttataattatgacaaaggataaagtcattagaacaaattctttttattagttgacgtattgttgtgtttatatctcttgtgtttgttattaagatggaagctcaatcatgtccttgtttaacagaaaggtgatgtcttggcattgataattctgattcaatatccataggtacatggtggattctttaaatatttagtattcttttatttctggaaagttttcttaaatgatagtttttttaaaatttcatttctataaagttttcttaaatcatactttttagtgttttattccattacttcatatttcttcttcaggaactcctgctatacatgtatgttggatcttcattacccagcttcaatatttttcacttttcatgcattctttttatttcttcatttctctttaaatttttttcttccttttcaccttctatttctcttttaacataattgtatttatttctgtattccacatagcttagtattcacttattttaaaattattttaaaacgttttttagatttaaaaattctttttttatttatatatacatattttatttttaccaaaggagcaacactattaactgaagacttctataatttttttcttttatttctgattctttcttcggttttccccctcagttttgaacttttctaattttgatttgtgatgtccttttgtattttagataattttcctaatgttttccagctcatttggaaaggctacagttttattctgtacctaagcaagtctttctggtgtcaaagatttgaccttgatacttttcttttgctcattttcgtatgagattagttttcctgtactttcaaaagaaggcgtggttcaagatggctttcccaatttcacatctgtctctaatgtttttgtgtaatgtctaaaatatggaaacttggtttatgagatctactctgccatttttatctgggctttctcttccttttgtctctgttgtacctgtcctgcttggttytgatttaaccccagtggtttctcctgaatgtggagccttctcctagaaggcagcctcggctagtcccagggttcagagtagccagctgctctcttcacctaagagaccactgtggattccttgtactcacttgctattggcttggacaaaagccctcccattttcagatgctattatcagattaatctctcattaatctgtctttccagtgtatgcctgtgggctatcttggggttctcttgttatcagacacctccctgctggcctctgctttctcccgtacagatgtcagtactgtgcaggtcttaattgctgttggtggtttgcccctacattcttacagttttagtttcccaaggatacctttaaacttggttttattgtaaatgtcgacaatggattttgggttttactatctagttctgtcttaattctggaattcagaaagattaaaagctctgttgttgcagctgctgccacctcttcccagtaccctctcctcctatgtcatttttttcttcttatttttcttgactgtataagagagaatgtatgacatttcctgcttgaccgctgagtttgattataaattaaawtacacaatattttatacaaattgttttgtagaagatttatttacagatgctcattcacaggtaaaattgacttatgaaaatagttttcatgacaaatgtatcaggctcggtaactaaatatatggattgatcttgtttataaatgaaattaaatgtgaatgtaacttacatatttctgtatttgcttacatccgtatgtacacatataatcagcaaatgagttgatgtttcctattcgtaacttaatggtaatagcttggtaacagagttgggagtattaaaaagatgtaaagagccccttaaaattttgttgctgggaattttagtgttctactgatgaaggaaatagacactggaaggygttgtttctattaggtaacttagatatcatactgaagacttcaaatacttattgttgacactcaaaagacacacttagtgtaagtaagcatttccccgcttttcccaatgaaataagatcattattataattccattataaatgctgatgatcatatttatagaaatatagaagataagacttgaaatgatattcgctaccaattaatgagtttgaagaagaaatcaggatgtgttttgctattttacatttattcttatttaactccaaagaattcagtgatgttatgtactattatttccatttctctgtgaagacgttgaagcttaagtaacacgcataataaggtcatacatttagcaagtggctcaattaaagttcaaacctggttctgcctggtttcaaagtctgtgctactccatggtattaggctacaacatgacttagggtttcttcctctgctctattgctgttcagatgtactcctcttttggcagagtgggagaaaatttttgcaatctatgcatctgacaaaggcccaatatccagaatctacaaggaacctaaacaaatttacaagaaaaaaaaaaaaacattaaaaagtgggcaaaggacttgatcagacacatctcaaaagaagacatttatgtagccaacaaacatatgaagaaaagctcaacatcactgatcattagaaagatgcaaaatgccttttctgtatgccaccttatatccccagtatttattatttctaagtcatagtatcttacagtgtatataagtctcatccgttcttttgattttctcttccctgcttgcaattgggtacctaggaacaaagttgcaatcttagccagttttttctttagcctttgctgatgtgtgaaaagcccttttttctaccctggatttctgtacttaagctggaacagctaagtttttaccttttttaaatataaagtttcagagtcttctgccaaggatcttttgctgttttcctactgttaaatatttcaaagccttttttaaacatagggaatataatcaaacatagcaagcagctgatgaacaatatctagatagtcttcattattgaaatggaataaatggtatttttgtattttaggctaacagacaccttgtaccttagataaggccaaccttctcataaaatccctcagttacttttattaataataaccaaattaactctggattccagggtgtactcatgatggaatgatttctctgtcatgttatcctgaggatctagtactctgagataacataagtgtatgacactttaggcttatgaaacacttagctacttaaattatttaattttttttcatgtgcagatggtattgtacccaaacactacctttgtgtgtgtgtgtgtgtgygcctgtgtgtgtgtttttgagacagggtcttactctgctcaggctggagtgcagtggcgtgattatagctcactacagccttgacctcctgggctccagtgatcctgccaaagtgttgggattgcaggcgtgagccacctcacccagccttaaattatttttttttcaaggatgtttaacctgagggttagaggctctttggcacgtgagctgctgaaatgtgtgtgaaagtgttgtgcacgtgtatgttcctctttttttctgggaagtggatctgtagtgattcttagatgagtctatgagacaagaaacttttatttttttcatttatttagcgaatgtttgttaagcgtactatgccttggccactctacagggtgctgattggaccagtctgtctacctaccgttgtagatgttagaagctatattcttttcacatgcctaatataactctttgtgtatgtatacatgcccaggcatgttccttcctcagaacattaaattcaccattttggtcaactcaaagcaagtacaccatgggacacagatctgaaataatgtccagatttttacttactgaatgaggtgtgttgagtgtataagactacatgatgagatggcaagtaattgcctgaagaaatgatgtagtgattttgtgtgtcttatatttatttactttttgatccagaaataaattatatagataccactattttgtttggatgggggagaaaggatgggtgtgtattcaggaacttatgttacttttttgcaactaataccccttctcagtagtacaaagatttgatttctttttctttctatttcctacagacttcatctgcagagagaaagagacgattacctgtgtggtttgccaaaggaagtgataccagcaagaaattaatggacaaaacgaaaasgggaggtctttttagttaagctggcaattaccagaacaattatgtttcttgctgtattataagaggatagctatattttatttctgaagagtaaggagtagtattttggcttaaaaatcattctaattacaaagttcactgtttattgaagaactggcatcttaaatcagccttccgcaattcatgtagtttctgggtcttctgggagcctacgtgagtacatcacctaacagaatattaaattagacttcctgtaagattgctttaagaaactgttactgtcctgttttctaatctctttattaaaacagtgtatttggaaaatgttatgtgctctgatttgatatagataacagattagtagttacatggtaattatgtgatataaaatattcatatattatcaaaattctgttttgtaaatgtaagaaagcatagttattttacaaattgtttttactgtcttttgaagaagttcttaaatacgttgttaaatggtattagttgaccagggcagtgaaaatgaaaccgcattttgggtgccattaaatagggaaaaaacatgtaaaaaatgtaaaatggagaccaattgcactaggcaagtgtatattttgtattttatatacaatttctattatttttcaagtaataaaacaatgtttttcatactgaatattatatatatattttttagctttcatttacttaattattttaagtacctttatttttccaggatgtcagaatttgattctaatctctcttatgtagcacatgtgacttaatttaaaacctatactgtgacacagagttgggtaaacgatgattatttaactttaagcagttcaccatccatttcaaagcctttgattggcttttttgtaaataaaaataacttgttaagaaacaaatatatctgtcatagaagaactagaaaatccagggaagtgagaaaaatgaaaataaaaatcattcatagttttactagtagctaatcacagtcaacctcttttgtgtatcccaccagacttttttatattcatttgtttttagktaaaatataaaagtctcgtatattcccatttttctgcattgcattachagaaggtagtggcgcctattaaatatgtgatatgttgttgtccagccatggcttctgcatttgcatgcttttgtgtgtgcatctgcaataccctgtgaatatcctgtgtgatggagtggcaagtacgcacagacacgtctgctgcatgcctaggtacgaggctgtctccaggagaagcacttgtttgattatttgagttgccaattgaatttgctgctttttttcatggcttgccattttcactgaaaagaatgactaatgaaaaacgatgattggttattagatttggatgtttggcagacattttctcaaaattgaactaagttggcctcttcacggaaaacaactggtatttgttgtgccaatgataaaattggagatttctagcaaaatgtataattttggaaaagttgtgttcctccactggaagcttgacagctttccttaacataaagacttctctttctcttcgctttcactactactactactaattcttcttctgattcttcttcttctccttcttccttcttccttccttcctcctcctcctccttcttcttcctcttcctcttcttctttctctctttccttccttcccttccctttcccttccttccttccttccttcctgcccgtccgaccgccctgccttccttccttccttcctccctccctccctccctccctcctttctttttctttctctttctttctttctttctctctctctctctctttctttctttttctttctctttttctttctttcaagcagtcctcccgcctcagtcccccaaaatagtgggattataggtgtgagccaccatgcacagccttacataaagccttttctaatgagatggatagtaattaacaaatgtgagtttttgatattatataaagattttttctgtgtttcgaagatccgtataactcagtgaatcagtatgttctggatgactaatatgtgatgttaagaaatcatgactgaggccgggcgcggtggctcacgcctgtaatcccagcactttgggaggccgaggcgggcggatcacgagatcaggagatcgagaccaccctggccaacatggtgaaaccccgtctctactaaaaatacaaaaattagctgggtgtgttggtgcgtgcctataatcccagctactcgggaggctgaggcaggagaatcgcttgaactcaggaggcggagattgcagtgagctgagactgcgccactgcaccccagcctggcgacagagcaagactccgtctcaaaaataaaaaaagaaatcatgactgggtaaaagatctgttcagagtacaagatggaccaatggatttgatatatttgaatataacagagtatgaaaaagtttattgatatagtttcagattacacactgcaactaatctttaagaaactattacttgtccactttttggtaaaatttcagagaacaatgtccaccattatctgaacaggctattaaaatactcttctcttttccaactacgtgcctgtgcaaagtcagatttttttcatatacttcagccaaaacagcatatcaaaatggattgaatgcagaagtagatctgagaatacagccacttttgttaagccagacaatgagatttgcaaaatgtaaacaatgctgctgttctcagtttttaaaaatatgttttttaaaagtatttatgttaatgtgtacttggtttactactgctatttttaaataaaacaagaaacatttttaaatgtctgttttaatttctaaagtggtagtgatagatataacccatattaataaaagctctttggggtcctcagtgatttttttttaagagtatggaagggttctcagacctaagagattgagaaatgctgatgtaatgttttattataaaggtgtaccatgaattatgtaccttacttcatattgttggacattaaagttgctttcagtttttttgttttaaacagcactgctttgaccttttttaaaaaatgagtcagggtcttgctgtgttgcccaggttggagtgcagtggctattcacagacatgatcatagcatgctatagccttgaattcctgggctcatgtgatacttctgcttcagcctcctgagtagctgggactataggcgtgcaccactatgcccagctgctttgaatattcttgaaatgaaatatggtatagtctcataccatatcatagccagagggggagagagagaattttgttgttgttgttatgttatctgtagtggactttatgccttcccagcataaattctctctttccccatttttcgtgacccttgatttttgttggggttcgttccaaggagaataatttccatctggatattggattggcacctgtgacctcttctgagctagaccctagtaacagcgtttggatctggggtaggtgtgtggccaactgagctgctggttcatgcctttcctgaaatgagccctacctctgaatatttcagaaacatgggacattaacttccctttacttacgttaaacccctttgaatgaggagttgtttttcacttccagttgtgttcagttgtcacagaagcacagcgatgtgattggtggaaggacccgtcaacagacccagaagatgtaaagtgtttttaatctcaaaggatgtggaatctcagagatagttacaccgagtagaggatgaagcggctcctggatggaggcagaggcttcctggatcttcaagttctgtatgggttgttgtatgaggttggtgcaaaagtgaggcaggagaatagggtctggaggcaaggaaactaaggccgattcacactgacttcctagaactaaatcaaaaggaaaaccccaattttccagacctaaataacaaaagtaccagatggctcctccctttcaactgcccctcccccacacctttctgcgtgacacatggaaaattgaaagtatctctggttgcttctgcgtaggaatgtaactttgtaaccaatcagacggatcgcaggccaagtcgcctgcatagaaatgtaactttgtaacttcactttagcctctgattggttgctttccacaaccaatcagatgcttgcatagggtgtacctgttgtgacttcacaaagtggtggaagtggtggaagtggtggaagggtggaagggctatttaaatttttattcatcctctgattggttgtttcacttaagcctctaattggttcttgagtcctggagcctgtgaagggtactttattttcagtaaatgcatgctttttttgcttcattctttccttgctttgtgcattttgttcagttcttagttcaagacaccaagagcctggacaccctccactggtaacaaaagtaactggtgtttttgccattagaagtaatggcacagaacaagtacatgagagcgatttcttatggaaaattaaatggcgcataagtcgtgtgctcaggtaagggagctgggaaccggtagaggaaggtctccaacccacacccgtgggatctctgagtctttgaaagtccgtcctcaccctttgtgaagaatgggagcacggctggactcgtcaccgggggttttggggggctgaacttgtcatttgagggtgtagggaggttggatgaatcgcaggggtgcagggagggggcccactggagctccaccaggaccccagcaccctagatccaaacctggtcatgcttcccatgctcagaggcaaatctccctccccttggggggcggagtcagacgagaccccctctccatccttttccaggtccggtgggggcgggactttaaaggtaaaaacagcaattacttttgcaccaacttatcttctaagtttcgctccctaccacctgagtgtgtttggaggctctggctcattgtacctgcctgatcaccaggtgcaagtagctgggccagaaggacctcggcacgttacggaatatttactacaggaacaggtgagctgaaggcgaattccccaggtgtagcctgtgaccatagattcagacaaagccctgactgttgcctggaattcaaaaaagctgtagccctaccagatagaataagaaaagaatataggattcttcctattcaaataggttgcatataattaagagcatgaacgatccaatggaatgaactcaaagtagtttttgagtgtaatagacttgaagtgtcttatggaaaagaattgcaaaaccacagaaacagtgaagaaggttagttatagccttgatggggtagctgacttcagcagtctcagctatctgaaaagttatttaccagattttggttgggaacataatccctaaatcatttgagataatgtacttgtttccttactgggtaaatgtgtttaaaccttgagaaaatgtagacataagtagaatatagaataaattaaacctttggtagttatgttttaggattaaggactaataagtacatatttgatatttaagcatttgtaatgcttgagataatttatcctactcaagtaacagattactcttgtgactccaatgtaaaatatatcattgaaaaattagtatctgcttgtgatttttaagtagaaaccctgccatttgaaaggtatttgcctttattattggagatatttcatatgaatgtttaactttgttattgcatagaagtatttaaacagatttcacttgcaagagaaagatatctaataggttactcttaatcagtactaaattactacaattactatattctattaatatcgattcattaaaacccagagctttaattatgtctcagaaaattaattaaactttagcctcataatcagctttattttctaactcaatgtttaaaaattgacaagtatgtattatacttatttatgtcttcattcagtaaacatttgcatttgtagcatgcaagacaacatgctagacacacgaaagatggaataaatggaagaaaatgcaacacagatctcatgcttaagagggacagatttactctgaagattcaatgaaaaaacatccacaaacaacttttctacaagaaacaaaacattttaaagaaaacatttacttcagccgggcgcggtggcttacgcctgtaatcccagcactttgggagggcgaggtgggtgcatcacgaggtcagaagttcgaaaccagactggccagtatggtgaaactgtgtctctactaaaaatacaaaaattagcctggcgtggtggtgtgtgcctgtgatcccagctactcaggaggctgaggcaggagaatcgcttgaacctgggaggcagaggttgcagtgagctgagatcaggccattgtgctccagcctgggcaacagagcgagactccgactcaaaaaaaaaaaaaagaaaaaaaaaaagaaaacatttacttcacataataagatatgagaaaaaatggactctctgaatgaaaaaaagaggagatcatgtgaaagatttgcgctttttttttttttaaagttatggactgaaacactcctaatcattaacatttgttattttaggggagtggaattggaaaggtggaaagggctatttacatttttataatctccatgtcttttaaatcaatatatattgcatttattcttttagttaaaattttaagaactctataaaaaatagagacagggactccctttgttacccaggctggtctcaaactcctgggattaagtgatcctcccacctcaattagaagggtggaagggccagctgtttaagtttctataatctctgttaaatcaaatgtatattgcatttattattttaaattttaaaaacttttttaaaaatagagatgggatcttcctatgttgtccaggctggttgtgagctcctaggatcaagtgattctcccgccttgacctttcaaagagctgggattacaggcatgagccaccatgcccagcctatttatttgtttatttatttttagaggcagggtctcactctcactagactgaagtgcagtggtgtgatcatagctcactgcagtctcaaactcctggactcaagcaatcaactagcctcagcctctgagtactgagatgacaggcatgtgccttcatacccagctaatatttttgtagagatggggtcttcctgtgttgcccggaagagtctcaaactcttggcctcagcctcccaaagcactgggattgcaggcatgagccacaacacatggccctgcttttaaaaaatatatagtgggccaggctttctgggatgatgggcaaccattacatttgctttctctccattctgaatgtcagcctccatacacctctm

SEQ ID NO: 5615 - DNA, 45268 bp, Homo sapiens
  misc_feature (1)...(45268): n = A,T,C or G, or insertion/deletion polymorphism (see Tables 1-2)
aggaatttatctatttcttctacattatttaattagttgatgtactgtttttcatagtagtctcatgattttctgtatttctgtggtatccattgtaatctttcctccttcatttataattttatttgagttttttttctttttctcctaattaggctaaagatttcttgatttatctttttaaaaacaataacagtgtcattgaccttttctgttgtttttctagtctctatttcatttatctctgctctgatctttattattttctttcttcctctgtctttgggcttagttttttttttttactttcttattgcttcaggtgtaaagttaggatatttcagatctttccattttcttaaggtaggtatttatcgctataaacttccttcttagaactgcttttgctgcatcccataaattttcaatgccacaaattttgtttctcttttcatttttctcaagacattttttgattttccttttgatttcttctttgactcattggttgttcaggagtatgttaattttcatgtatttgtgaattttccatttttccttctgttactgagttctacttttatgccattatggttggaaaagatacttgatatgatttcaatccttaaatttgttaagatgttttccatggcctaacatataacctatcctggagagtgttctgtgtgcacttaaaaagaatgtgcattctgctgcttttgaaaggaatgttctgcacatgtccgttaggtctattggtttatagcattttgaaatccacagtttccttgttgattttctgtccaggtgatctattcattgttgaaagcatgttgctatttatttctcctttagttatgttaatatttgctttatagatttagatgcactgattttgggtacatgtgtatttacaattgttatatcctcttaatgaattcacccttttaccattatataatgaccttctctgtctcttgtgacagtatttgacttaaactctatctcatctgttataaggatagccacctctgctttcgtttggttatcatgtgaatgcaatctctttttcatcccttcacttccagcttatgtctgtccttaaagctaaagttagtctcttacaggcagcatatagttagatcttgttttttattcactcatccactctctcttttgattggataatttaatacatttacatctaaagtaattattggtaggtaaaggcttactactatcatgttgttaattgttttctgattgttttgtagttcctttgttgcttctttttgtctcactgtcttcctttgtgacttaataacttttttggagcaatttgctttggttcctttctctttatgttttgtatatctactacagactttttctttgtggttatcatgaggtttacataaaatatttcatagttataaccatccattttaatctggtaacaactttgactgcatttaaaaatactgtattttaacttctcctcctcccacattttattattcatgccatagtttatatcttttgtatgttgtgtattcattagcaaattgttgtagttatagttatttgttaatactttggttttttaacttttatactagagttaaaagtgactgttgcacaataacagtattggagtattctgtatttgactgtataagaatacctttaatagagttttattctttcatttgttttcatgttagttagtgtccttttgtttaaacttgagaattccctttagcattttttgtaaggcaggtttaatggtgttgaaatcccacagcttttatttgtctggtgatatgatttgttcctgaacttccacccaaatctcatctcgaattgcaatccccaggtgtcaaaggagggacctgttgggagatgattggatcacgaggtgttttcccccattatgttctcatgatagtgagggtgttctcatgagatctgatggtttaaaagtggtggttacccctgcgcacatgctctctctctctcctgctgccttgtgaagaaggtacctgcttccccttcaccttccaccataattgtaagtttcctgaggcctccccagccatgaggaactgtgagtcatttagacctcttttgtttataaattacccagtctcaggtgatatcttttagcagtgtgaaaataaacaatacagagaattggtactggcagagtgaggtactgctataaagacaacctgaaaatgtgaaggcaactttgaaactgggtaacaggcagaggttggaacagtttggagggcttagaagataggaagatgtgggaaagtttgaaacttcctagagacttgttgaatggttttgaccaaaatgctgatagtcgtattgacaatgaagtccaggctgagatggtctcagatggagacgagaaactattgggaactggagcaaaggccattcttgctatgctttagcagagactggcagcattttgcccctgccctagagatctgtggagctttgaacttgagagagatgatttagggtatctgtcagaataaatttctaagcagaaaagcattcaaatataacctggctttttctgaaagcatacagtcaagtcatatgcgttcacaaagagatggtatgaaattggaacttatgtttaaaagggaagcaaagcataaaagtttggaaattttgcagcctgaccatgtggtagaaaagaaaaaccaattttctgaggaggaattcaagccggctgcagaaatttacataagtaatcaggagctgaatgttaattgccaaacaatggggaaatgtctccagggcatttcagaggtcttcaaggcagcccctcccattacaagcccagaggcctaggagggaaaaatggtttcatgggccctgctgctctgtgcagccttgggacttggtgccctgtgccccagccactccagctccagctgtgactaaaagggtccatagctcaggctgtcgcttcaagggtgcaagccccaagccttggtggcttccacgtgctcttgggtctgcgagttcacagaaaacaagagctgagctttgagagcctctgcctagatttcacaggatgtgtggaaacacctggctgtccaggcagaagcctgctgcagggacccagccctcatggagaacctctattagggcagtgcagaggtgaactgtggggttggagcccacacacagagtccccactggagcactgcccagtggagctgtgaaaagagttcccccatcttccagatgccagaatggtagatccactgactggaaagttgcaggcactcagtgccggcccatgaaggcagccgtaggggctgtaccctgcaaagccacagggacagagctgcccaaggccttaacagcccacaccttgcatcagcatgccctgggtgtgagacaggggctccaaggagattattttggagctttaaaatttaatgacttccctgctaggttttgcatatgcttgggacctgtggcccctttattttggccaatttctcccatttggaatgggaacatttacccaattcctgtacccacattgtgttttggaagtaactaacttgttttttattttaaaggctcattgagggaagggacttgccttgtctcaaatgagactttggactcggacttttgggttactgtggaatgagttaagactttgggggactgttggaaagacatcattggttttgaaatctgaaaaggacatgagatttgggaaaggccaggggaagaatgatatggtttggctctgtgtcctcatccaaatctcgtcttgaattgtaatccccacatgggattacatgggaggggcctggtgagaggtgattggatcatggaggtggtttcccctgtgctgtgatctcatgatagtgagggatttaaaagtgacagtttcccctgcacatacacactctctctctcgtatcaccttgtgaagaaggtgtctgcttcccctctgccttccatcgtgattataagtttcctgaggcctccccagccatgggtaaccgtgagtcagttaaacctcttttgtttataaattacccagtctcaggtagtatctttacagcagtgtgaaactggactaatacatctgggaaattctttttctctccttcctttctgaaggacagctttgcctgatattatattcttggttgccaggttttgtactttcaatactttgaatatatcatcccactctctcttggcctacatgatttctgctgagaaatccaccaataatcttatgaagcttcccttgtatgtgaagaattgcttttctcttgcttctttgaaaattctctctttgtcatggtgaggatttctttttttttttttttttttagatggagtctagctctgttgtccaggctggagtgcagtggcgcaatctcggctcactgcaagctccgtctcctgggttcacgccattttcctgtctcagcctctggagtagctgagactacaggtgcccaccaccacgcctggctaaattttttttgtatttttagtagagatggggtttcactgtgttagccaggatggtctcgatctcctgacctcatgatccacccatcttggcctcccaaagtgctgggattacaggcatgagccactgcacctggccgaggatctctttatatttaatctatttggagttcttttgggcttcataaatctggatgtttatttcatttatgtctccaaattttgagagttttctattcttatttttttaaataagtttctgcaactttctctttctctacttcttctggaactcttctaatgcatattaattttcttaacagtgtcctataagtcttgtcagctttctgcaatttttatcattccttttattactctgactgggtaatttcaaatgacctgtatctgagcatgctgattctttctcctgcttgatctagtctgctgctgaagctgtttgtgaattttttcaattcagtcattttgttctttagctccagaatttctgtttcattcttttttatggttcctatctatctttttgttgaacttctaattttgctcatgtattgttttcctgattttgtttactgtctatctatattgttttgtagcttattgagctttcttaaggcaattatttttagctctttgtcatgcagtaaagatctccatttctttagggtcacctcctgctgctttatttccttcctttggtggtttcttgtttccccgattatttgtgatcagtgtggccttgcactgaagtaggcacctatttcagtctttacatactagcttcagcagagaaagccattcactagtcagattgaccagagattgttggtgggctgtctgttggggtctatgcacaggatttctgctggagttctaaggtgggaagggctggattctgggttcattcactgtggttgtctgtattctgtgcacaaggactggcttgaagcatggatccttgggggctgacttggcactgaaatgagccttaagcctgcgtctgcaggggccagcctaacatggggatcacctggcacctgagttcatggggataggcctgttcctgagtttattcaggctgtcctgggaacaaggtccactggggtgagcccagcatctgggtccacatggcccagcatggagccaagatctctggaggctgacctggtgctggatctgcaggggatggcctggattctaggcccatgggtgccaacttggagcctggggttgctggggctaacgtggaggctagatagagtcttgggggccaggctagagctggagcaggcctgaagtctaggtcttgtgtggccatcttggagcctgaagccccaggggctgacctggtctggggtgagcatggggctgaggccacagaggctggtctggcctgtggcaggcctgaatcctggtgctggggtttactggagtgggcttggtgcttgggatctgtggtgaagttaggttctatcttaactgtccctcctccatgcaagagggcatctctctccatactgtgctgcccaggcttgaaggtgagatgacaccggtaatgtgaaattgtccttcctatacacttctatgtgtcttttcttatttctgtgctgcaaccaggtggcataacctctcacctgattccttagctctagtgaagttattttcgtgcatggatacttgttcgaattgatgtttctgcaagggatgagcgctagaaactcctgttctgacaaactcctattcctattcttgctgacatcactccctgaaatagttaatatacttaacagctgaacacggataggatgttcatggaatatgttgacaggacaaaaagttgaaactgttggcagaaacccaaagtcaatattgaagccaagcaaaatattgcctgcagtgccacattagaacagcttgaagaccgttcatttttaagtgacaagagactcacctccaagaagcaattgtgttttcaggtagcaaatttttattattctgattgtttccaaataaactataatttttaagtataattttttactttatgagaaaattaatcatttatattctaatttcctgagtatgtagagagtatagataatgttcctttatgtagaaatatttaaatgtaagatgattytaaatcagaaagaatatttgattgatttaaaatttttaaatgggctttaatattttcagaggttttctttacttagggatttttggactgacattattgccattatttattaattttgtttttgcccaaatcaagaggtttcataattgtttactctctctctaccaattccctttccaacattactagccacagagttggccaatgaacaataaacacaacagtagtctggaggtctcaatttgtatcttgggaagcattataaattttccaactccctagacacaaatgtaccaaaaaaaamcccttgttttctataccagtaatygtgtgctttgtcttgcaattcagacatttacaagaaaatctaaatcaccttaaattaagatttatgttaaatgtggtctaaaaccagcagagttatgtattgttttcttttttagaatgattttattcaagcaagcaacttatttcatttccttgtttgctacagtttcctgtggtaagtgaattatctataaaacatggaattcaggctaagacaggagtagccaagcaagtggcaccacccctggagaaagctattgaacatacagcttcgggggtggagattgtccctgatgattcaggacacrtgtctatttaatgttccacaacaaggaccacttgtcaggtatattgctgtagacatatgttgcagaccagaggaaggagctcagaagtaggaatgtcttgggacttgtgttaacaaaaacttctgttcgcagatgacactctgcaaagcaaaacttgaaacaaaaaaaaattagtcctctatttttattatcaacagtaaaaaattaaactttatctgaaaattcaaaagagtgctaggcattttatagtgtctgggtccaatccaagtatctgttaggaacaccatacatagttttactctggaccgctagggaaccatttcaaaaatgaaagtaactggtttaaatttaacttagcaaaccatgcatttggatagttctaggtgaatagctttcaacaccagatttagatctcatttctctattaatttcattaatttttggagaataaaaatgattctggacatttcattaatcattacagagggagttttctctgtgtccccacaaggcatgattctgggtctatggtgacttaagagggccacacaacaatgagtatttaattttcctcagatgtatggctacaataaacatctataggtaaggtttacattcataaagagacctttttttttccaggaaaaaagacttttattccccctaaatcacaactcccctgtgtctgtccctcaaccctgatttctcttctaaaccgtaatttacaaacccatgtgcaaacccactgaaaggtgagaaggagcataagccagagacactgggaaccacagccaactacagggggtttttcatttttttgttttgttttgttttttggcaaaataaatcatgattatggctaggaaaatcagggatgtaagtaagcaaaaatttagaaactacatattgcatgtagtccccaaattcagaaacagtcrtcgttaaacatcttttatttagtctttcagatatttttctacatatacctatttgcacatttcacaaaaaagagttattaactgtggacactctttgacttgcattttccacttatagctatcttttggtgcaaataagtaatatattttggagcttgctattcttctctttttatggtatttttgtgtgcacattcttatgctcttattcagttatttctgtagaatacawtttttgaaataaaaatactagattcaaaggtgtgaatatttttgaaggttttgtggtgtggtatcatgaaattaggtttcagaaagtttactccayagttgactttttctaccagctaataagagtgctcatttaccccacttaggccaactctaacaggcttctgttgctttgcatcctgacatatttatctttctggaaacagtgtcctaatttatttctgcagagctactgcctctcagttttggtccatgtggttctggtgaccctgattcttctgctgaaccagaaagtgcacacatcctcctggctgtggtgacccaatcagagccaacgtcttgcaatgaagcttttctttagacatctagaaataagactcttatgttttttttttccaatttgacttgaaacttaagacaatacacaggcctgagttgttggtactattttgctactacgtggagcttgagagtaatggtaacaccaagactggagcaagtggaaggagacatattgtccactgatgctatcagttgagcacaatgtgcagttactttttaagccagattcaccatgggctttttggctcctgaaccaatagatttcatttgttttcaagccactttgtactaggttttccatcatttgcaatcaaaaccagtatacaaacactggttatttaatttttcatttttgctaatctcagggataaaatggcttctagttgttttaacttggctatatttgtgattcttcccattttcatatacttactaatcacttctatttcttttgtaaattatcttttcatatttgttatctaattctttaaaatttgagtactttaattctcattattgtttgtggaattgttaaacaagactgaataatctgcccaaagtccatggacatgggggcccatgtaaaagctttgaaagccaccatcattatgagataaattatataatagtactttacataggctccaaaatacagcacagacacagctatcattgtcatggtcatcattatcatcatgatcaccaacttatgaggataagcaagaacacctactagaagtttctttccattcagcaacaaaattggtgtctttctagtcactcccttccctgactgtcacatagcagttcacagaggctcagttgcagaatgagaagctctgggccaggacctgccattgtatgcatccttgcatgggaactgggggctggaagaggagtgactgcttgataattatgagtcagtcaaaaccaccaactgtctgaaaaaaataggcctttttgtaactagtattgtcactaaaccaactcctccatgttttgtgcatacatgaaatctaggcaatacacttgtattcccaaaagcttccacttgaagagatctgtgctctttccaaatataaaccttaccygagaggtggtcatcttggccacacctcagagagggagagaggcagtcttgttgggttgggtggtcataatggggctcagggccaaatccccagggggtaggatagtgcagagaagatggcactctccagtgcttaataaaatgcacgtggtctaagctgcccactccctcaaaggcaataaaaawtaggtactatttaaattgaagagtaactactgccccagggaatggacaggttgtcattggaatagccatggttaatggtcccagttgacaactgaaatgaatgtgctacctgaacaggaaagcttattaaccagatttcaaagacagtctttcccggtaaatccaaatttacaaattaaagccagtaaagacaccgaattctctaataatatgtggggtgcagtatattttagagctgggaataattccaaacagcaaatagttcaaaatttattttcaatttagcatatgcatgcatttgcttaaactgtcttaaaaatgagtaaaaaayactgtcagtttgtttcaatcatactgagatgaggaacaatgtttagcattgcatgctagaaaaggacacaggattgggagtcagggctgggtgaccgtcacaggactttcactaactgtgtggatcttgggcaagtctgtgtgccctgagactcagttatttaactttcttttaaaaaacatagtccagatgcagataacaaagcctgcctctaatttcccttacagaattgtgagaagctggtggagatgtttgttacaaaagtgttttgaaaatagagcaaatattattctttttaaggcatgatgttttcatagcatgtcaggcaacaggaaaaaactaagttaggattttattttattgtggggaatttatgtgcaaattattgtgcaatttaatgaaaataagccaatgttttatacagaagtacccagaaaattaaataacactatacattgttcaaatagttgccttaatatattttattttctcagcataattagagttgtattatacaggtctttgagtagtcagtcagtgggagaagttaagacaacagatatctttttattaaaattattatatgaattatcgcaaattaatttttatggttctgtcacaggatgtctgactcaactctatgaaaacgccttcttcagaggtggggatgtagcttccatgtacaccccaaatgcccaatactgccagatgaggtgcacattccacccaaggtgtttgctattcagttttcttccagcaagttcaatcaatgacatggagaaaaggtaaaagttggtatttcattattggagaagctgtttttcaaaactgaatcagttttgtgcagaaaggtgtagtataactgagagttcttcctcacacggggttcaaggaccagcttcagcaaaatcccgtcaagtggttcttacaaatgcagattcctaggccacaacccagatctgctgaaccaaagtttcttgtgaccaggaatctgcattttaaacaatcactgtgtttctttaaagtagtagaagctagtcattttctattcaaagcctcaaaatgcttgaatatcattgggctaagggattgtctcaagaaagagtctaacaggtgaacatttcatcygaataaagaaacagatttaactgtgtgacccatgatcacattagcggatagcacagtccaaagaaaataacataagacaagcattttgctgagaatgtaattgagaaagatctagaacttgtgattttgggacagggcagttctaaatggggcctatagtgagccagtttgggcacctgtggcatgatgctatgtatggtgtgtgtgtgtatgtgtgcttgtgcttgtgtgaatatgtattattaactggaaatttgtaaaagtattggaaaaatagtacttacgattttgtgtgygtgtgtgatggagtctcgctttgtagcccaggctggagtgcagtggcgtgatctcggctcactgcaacttccacctcccaggttcaagcgattctcctgcctcagcctcccaagtagctgggattacaggcacgcaccaccacgtccagctaatttttgtagttttagtagagacggggtttcaccacattggccaggctggccttgaactcctgacctcgtgatccacctgcctctacctcctaatgtgctgggattacaggcatgagccaccgcacccagcggtaattacaatttttattaggtcagagagatgcttattaatcacgagccacagtttcttcttaatgatttttccttttgattaatatccagagtaagcttttctttgttgttcccatttccatgttcataactctttactcatcttcactctatgtgagtttaccaactagaaattggatagtcattctctgatcccacatgttaaacttgtagagaaaactcagattgtatgtgaggatcatcatattaaaagtggaggaaggttctagaattcttataaataatgaaattaacatgaaggtggacatctaagacagagggaagtcttccattaagtgcagactacaaggagttaataagcaagatgaacacgatatacaaatccagctcttatcactaagttaactttttaagtaaatgaaagtatttgcaaaaataattaccaattgwgaacatagttgcctgaaagtttaagaacacaggaaaaatcattaactctttaatayggttgatttcctgtacttaaaaaatgtgagtgtaaagaaaacgcagtgatggagttagatattatggggtgttataaaattagctctaagagtgttctttccagcaagtattggggaagctatattattttccttattcctggttttatttgttagtgtgtagaaaatgctagacatttcctcaatgtatgtttattattctacttcctaagtaaagctacttttaaaataggtttggttgcttcttgaaagatagtgttacaggaaccctgccaaaagtacatcgaacaggtgcagtttctggacattccttgaagcaatgtggtcatcaaataagtggtaagttgtgaatttcttagctacatttgagttaatattggatctcgcttagaacagcttttgctcaaagtttgtactgctacagctttttggaaggcatcactcataaagataggagatggggcagtattctggacacaaaagagggacccatattcatctggacacttctattgtctttataaatcaacacatacttaatgagcctctattatttatgaggttagcgctcaagtgtaagatttgcagaaaatgaatccaaataattgtgtctcgtttccagataagaatttttaagaaaacacaagggaacatctctctcaagttcacttgagggtaatttttacatcagtgattctcaaccagcagtgattttgtctcttccactggggacatttgacaatgtctggagacatttttggtggctacaactagggaggatgctattagcatttactaagtagaggccagaatgtttgaatgctgaccaacattctacaaggcacagggcagtcgtccacagcaaataattttctggcccaaaacgtcaacagtgctgacatcaagaaactctgtgatataccactaggcccaaattgaagaactgagttctgcaaatcttgctaagaataatacttcctaaaggaaacttgaggactaggatgctagagaactttgattctgacatctgaagctactgatgtcttgggaaacagtttccaatgctatcctaataaatttaagacaaatgaactatttctcaaacatgactgggactgataagaaagtgaaaagtgctgaaaagattcaactgatgggttgtcagaatcttaaaataactgctgttattctatgtatgactatatatcattactattttattttcattatgcacaattaattttgtaggttcaaatttcagatgtttttaaatttgtcatcctttcctccctcattgatatcacctcttcaatacgtacacactttgagcctgctgtttgcattttaaccagttatcaaaggatggcaatgccttcattataaatgtgggcctgacttagccagtataataggtgtagtctacgtgaggtggagtacatttcctattttaaaagatcaatttttatgttaatccaatttggtataaattattcgagtaagtgctatttctgattgttgtatcttgtagcaaaatttaaagaaaaagtaatttgtgcctttctcaatattcctgttattgttcatgtattctaaaactcastgttactcacttagcttgcttttaatgttttttaaagtgaaaaattgttcccaagtacataaaatctctacactcaagaacaattctagtcaaaagcatttagagcttccgtatgaacacttaaagagtttttatttgtaagagtcgcatcccaactcttagcctgttcttttctcacatgcagaaaaataggaaagagacttcgtttccacagtctgcaaattcctgtgtttaagaaccacagtgaataatccacctccctgcccaactcatcgtactgtcatatagttttcctgacagtttgtgtattttctgtctttcccacccttaaatttagttttatgacttcaaccatacttcttaggagtggaaaggtatctgtagtagattatggtttattccacataatcttggggaataaaactttaaaaaagtatacagtttatacttctggttacattacttccttaaccaaaagtctaaccaagaaatttgaatctttaaaaaaaaaagaggccgggcgcggtggctcacgcctgtaatcccagcactttgggaggccgagacgggcggatcacgaggtcaggagatcgagaccatcctggctgacacggtgaaaccccgtctctactaaaaatacaaaaattagccgggcgtggcgcgcgtgcctgtagtcccagctactcgggaggctnnnnnnnnnnnnnnnnnnnnnnnnnnnnnnnnnnnnnnnnnnnnnnnnnnnnnnnnnnnnnnnnnnnnnnnnnnnnnnnnnnnnnnnnnnnnnnnnnnnnnnnnnnnnnnnnnnnnnnnnnnnnnnnnnnnnnnnnnnnnnnnnnnnnnnnnnnnnnnnnnnnnnnnnnnnnnnnnnnnnnnnnnnnnnnnnnnnnnnnnnnnnnnnnnnnnnnnnnnnnnnnnnnnnnnnnnnnnnnnnnnnnnnnnnnnnnnnnnnnnnnnnnnnnnnnnnnnnnnnnnnnnnnnnnnnnnnnnnnnnnnnnnnnnnnnnnnnnnnnnnnnnnnnnnnnnnnnnnnnnnnnnnnnnnnnnnnnnnnnnnnnnnnnnnnnnnnnnnnnnnnnnnnnnnnnnnnnnnnnnnnnnnnnnnnnnnnnnnnnnnnnnnnnnnnnnnnnnnnnnnnnnnnnnnnnnnnnnnnnnnnnnnnnnnnnnnnnnnnnnnnnnnnnnnnnnnnnnnnnnnnnnnnnnnnnnnnnnnnnnnnnnnnnnnnnnnnnnnnnnnnnnnnnnnnnnnnnnnnnnnnnnnnnnnnnnnnnnnnnnnnnnnnnnnnnnnnnnnnnnnnnnnnnnnnnnnnnnnnnnnnnnnnnnnnnnnnnnnnnnnnnnnnnnnnnnnnnnnnnnnnnnnnnnnnnnnnnnnnnnnnnnnnnnnnnnnnnnnnnnnnnnnnnnnnnnnnnnnnnnnnnnnnnnnnnnnnnnnnnnnnnnnnnnnnnnnnnnnnnnnnnnnnnnnnnnnnnnnnnnnnnnnnnnnnnnnnnnnnnnnnnnnnnnnnnnnnnnnnnnnnnnnnnnnnnnnnnnnnnnnnnnnnnnnnnnnnnnnnnnnnnnnnnnnnnnnnnnnnnnnnnnnnnnnnnnnnnnnnnnnnnnnnnnnnnnnnnnnnnnnnnnnnnnnnnnnnnnnnnnnnnnnnnnnnnnnnnnnnnnnnnnnnnnnnnnnnnnnnnnnnnnnnnnnnnnnnnnnnnnnnnnnnnnnnnnnnnnnnnnnnnnnnnnnnnnnnnnnnnnnnnnnnnnnnnnnnnnnnnnnnnnnnnnnnnnnnnnnnnnnnnnnnnnnnnnnnnnnnnnnnnnnnnnnnnnnnnnnnnnnnnnnnnnnnnnnnnnnnnnnnnnnnnnnnnnnnnnnnnnnnnnnnnnnnnnnnnnnnnnnnnnnnnnnnnnnnnnnnnnnnnnnnnnnnnnnnnnnnnnnnnnnnnnnnnnnnnnnnnnnnnnnnnnnnnnnnnnnnnnnnnnnnnnnnnnnnnnnnnnnnnnnnnnnnnnnnnnnnnnnnnnnnnnnnnnnnnnnnnnnnnnnnnnnnnnnnnnnnnnnnnnnnnnnnnnnnnnnnnnnnnnnnnnnnnnnnnnnnnnnnnnnnnnnnnnnnnnnnnnnnnnnnnnnnnnnnnnnnnnnnnnnnnnnnnnnnnnnnnnnnnnnnnnnnnnnnnnnnnnnnnnnnnnnnnnnnnnnnnnnnnnnnnnnnnnnnnnnnnnnnnnnnnnnnnnnnnnnnnnnnnnnnnnnnnnnnnnnnnnnnnnnnnnnnnnnnnnnnnnnnnnnnnnnnnnnnnnnnnnnnnnnnnnnnnnnnnnnnnnnnnnnnnnnnnnnnnnnnnnnnnnnnnnnnnnnnnnnnnnnnnnnnnnnnnnnnnnnnnnnnnnnnnnnnnnnnnnnnnnnnnnnnnnnnnnnnnnnnnnnnnnnnnnnnnnnnnnnnnnnnnnnnnnnnnnnnnnnnnnnnnnnnnnnnnnnnnnnnnnnnnnnnnnnnnnnnnnnnnnnnnnnnnnnnnnnnnnnnnnnnnnnnnnnnnnnnnnnnnnnnnnnnnnnnnnnnnnnnnnnnnnnnnnnnnnnnnnnnnnnnnnnnnnnnnnnnnnnnnnnnnnnnnnnnnnnnnnnnnnnnnnnnnnnnnnnnnnnnnnnnnnnnnnnnnnnnnnnnnnnnnnnnnnnnnnnnnnnnnnnnnnnnnnnnnnnnnnnnnnnnnnnnnnnnnnnnnnnnnnnnnnnnnnnnnnnnnnnnnnnnnnnnnnnnnnnnnnnnnnnnnnnnnnnnnnnnnnnnnnnnnnnnnnnnnnnnnnnnnnnnnnnnnnnnnnnnnnnnnnnnnnnnnnnnnnnnnnnnnnnnnnnnnnnnnnnnnnnnnnnnnnnnnnnnnnnnnnnnnnnnnnnnnnnnnnnnnnnnnnnnnnnnnnnnnnnnnnnnnnnnnnnnnnnnnnnnnnnnnnnnnnnnnnnnnnnnnnnnnnnnnnnnnnnnnnnnnnnnnnnnnnnnnnnnnnnnnnnnnnnnnnnnnnnnnnnnnnnnnnnnnnnnnnnnnnnnnnnnnnnnnnnnnnnnnnnnnnnnnnnnnnnnnnnnnnnnnnnnnnnnnnnnnnnnnnnnnnnnnnnnnnnnnnnnnnnnnnnnnnnnnnnnnnnnnnnnnnnnnnnnnnnnnnnnnnnnnnnnnnnnnnnnnnnnnnnnnnnnnnnnnnnnnnnnnnnnnnnnnnnnnnnnnnnnnnnnnnnnnnnnnnnnnnnnnnnnnnnnnnnnnnnnnnnnnnnnnnnnnnnnnnnnnnnnnnnnnnnnnnnnnnnnnnnnnnnnnnnnnnnnnnnnnnnnnnnnnnnnnnnnnnnnnnnnnnnnnnnnnnnnnnnnnnnnnnnnnnnnnnnnnnnnnnnnnnnnnnnnnnnnnnnnnnnnnnnnnnnnnnnnnnnnnnnnnnnnnnnnnnnnnnnnnnnnnnnnnnnnnnnnnnnnnnnnnnnnnnnnnnnnnnnnnnnnnnnnnnnnnnnnnnnnnnnnnnnnnnnnnnnnnnnnnnnnnnnnnnnnnnnnnnnnnnnnnnnnnnnnnnnnnnnnnnnnnnnnnnnnnnnnnnnnnnnnnnnnnnnnnnnnnnnnnnnnnnnnnnnnnnnnnnnnnnnnnnnnnnnnnnnnnnnnnnnnnnnnnnnnnnnnnnnnnnnnnnnnnnnnnnnnnnnnnnnnnnnnnnnnnnnnnnnnnnnnnnnnnnnnnnnnnnnnnnnnnnnnnnnnnnnnnnnnnnnnnnnnnnnnnnnnnnnnnnnnnnnnnnnnnnnnnnnnnnnnnnnnnnnnnnnnnnnnnnnnnnnnnnnnnnnnnnnnnnnnnnnnnnnnnnnnnnnnnnnnnnnnnnnnnnnnnnnnnnnnnnnnnnnnnnnnnnnnnnnnnnnnnnnnnnnnnnnnnnnnnnnnnnnnnnnnnnnnnnnnnnnnnnnnnnnnnnnnnnnnnnnnnnnnnnnnnnnnnnnnnnnnnnnnnnnnnnnnnnnnnnnnnnnnnnnnnnnnnnnnnnnnnnnnnnnnnnnnnnnnnnnnnnnnnnnnnnnnnnnnnnnnnnnnnnnnnnnnnnnnnnnnnnnnnnnnnnnnnnnnnnnnnnnnnnnnnnnnnnnnnnnnnnnnnnnnnnnnnnnnnnnnnnnnnnnnnnnnnnnnnnnnnnnnnnnnnnnnnnnnnnnnnnnnnnnnnnnnnnnnnnnnnnnnnnnnnnnnnnnnnnnnnnnnnnnnnnnnnnnnnnnnnnnnnnnnnnnnnnnnnnnnnnnnnnnnnnnnnnnnnnnnnnnnnnnnnnnnnnnnnnnnnnnnnnnnnnnnnnnnnnnnnnnnnnnnnnnnnnnnnnnnnnnnnnnnnnnnnnnnnnnnnnnnnnnnnnnnnnnnnnnnnnnnnnnnnnnnnnnnnnnnnnnnnnnnnnnnnnnnnnnnnnnnnnnnnnnnnnnnnnnnnnnnnnnnnnnnnnnnnnnnnnnnnnnnnnnnnnnnnnnnnnnnnnnnnnnnnnnnnnnnnnnnnnnnnnnnnnnnnnnnnnnnnnnnnnnnnnnnnnnnnnnnnnnnnnnnnnnnnnnnnnnnnnnnnnnnnnnnnnnnnnnnnnnnnnnnnnnnnnnnnnnnnnnnnnnnnnnnnnnnnnnnnnnnnnnnnnnnnnnnnnnnnnnnnnnnnnnnnnnnnnnnnnnnnnnnnnnnnnnnnnnnnnnnnnnnnnnnnnnnnnnnnnnnnnnnnnnnnnnnnnnnnnnnnnnnnnnnnnnnnnnnnnnnnnnnnnnnnnnnnnnnnnnnnnnnnnnnnnnnnnnnnnnnnnnnnnnnnnnnnnnnnnnnnnnnnnnnnnnnnnnnnnnnnnnnnnnnnnnnnnnnnnnnnnnnnnnnnnnnnnnnnnnnnnnnnnnnnnnnnnnnnnnnnnnnnnnnnnnnnnnnnnnnnnnnnnnnnnnnnnnnnnnnnnnnnnnnnnnnnnnnnnnnnnnnnnnnnnnnnnnnnnnnnnnnnnnnnnnnnnnnnnnnnnnnnnnnnnnnnnnnnnnnnnnnnnnnnnnnnnnnnnnnnnnnnnnnnnnnnnnnnnnnnnnnnnnnnnnnnnnnnnnnnnnnnnnnnnnnnnnnnnnnnnnnnnnnnnnnnnnnnnnnnnnnnnnnnnnnnnnnnnnnnnnnnnnnnnnnnnnnnnnnnnnnnnnnnnnnnnnnnnnnnnnnnnnnnnnnnnnnnnnnnnnnnnnnnnnnnnnnnnnnnnnnnnnnnnnnnnnnnnnnnnnnnnnnnnnnnnnnnnnnnnnnnnnnnnnnnnnnnnnnnnnnnnnnnnnnnnnnnnnnnnnnnnnnnnnnnnnnnnnnnnnnnnnnnnnnnnnnnnnnnnnnnnnnnnnnnnnnnnnnnnnnnnnnnnnnnnnnnnnnnnnnnnnnnnnnnnnnnnnnnnnnnnnnnnnnnnnnnnnnnnnnnnnnnnnnnnnnnnnnnnnnnnnnnnnnnnnnnnnnnnnnnnnnnnnnnnnnnnnnnnnnnnnnnnnnnnnnnnnnnnnnnnnnnnnnnnnnnnnnnnnnnnnnnnnnnnnnnnnnnnnnnnnnnnnnnnnnnnnnnnnnnnnnnnnnnnnnnnnnnnnnnnnnnnnnnnnnnnnnnnnnnnnnnnnnnnnnnnnnnnnnnnnnnnnnnnnnnnnnnnnnnnnnnnnnnnnnnnnnnnnnnnnnnnnnnnnnnnnnnnnnnnnnnnnnnnnnnnnnnnnnnnnnnnnnnnnnnnnnnnnnnnnnnnnnnnnnnnnnnnnnnnnnnnnnnnnnnnnnnnnnnnnnnnnnnnnnnnnnnnnnnnnnnnnnnnnnnnnnnnnnnnnnnnnnnnnnnnnnnnnnnnnnnnnnnnnnnnnnnnnnnnnnnnnnnnnnnnnnnnnnnnnnnnnnnnnnnnnnnnnnnnnnnnnnnnnnnnnnnnnnnnnnnnnnnnnnnnnnnnnnnnnnnnnnnnnnnnnnnnnnnnnnnnnnnnnnnnnnnnnnnnnnnnnnnnnnnnnnnnnnnnnnnnnnnnnnnnnnnnnnnnnnnnnnnnnnnnnnnnnnnnnnnnnnnnnnnnnnnnnnnnnnnnnnnnnnnnnnnnnnnnnnnnnnnnnnnnnnnnnnnnnnnnnnnnnnnnnnnnnnnnnnnnnnnnnnnnnnnnnnnnnnnnnnnnnnnnnnnnnnnnnnnnnnnnnnnnnnnnnnnnnnnnnnnnnnnnnnnnnnnnnnnnnnnnnnnnnnnnnnnnnnnnnnnnnnnnnnnnnnnnnnnnnnnnnnnnnnnnnnnnnnnnnnnnnnnnnnnnnnnnnnnnnnnnnnnnnnnnnnnnnnnnnnnnnnnnnnnnnnnnnnnnnnnnnnnnnnnnnnnnnnnnnnnnnnnnnnnnnnnnnnnnnnnnnnnnnnnnnnnnnnnnnnnnnnnnnnnnnnnnnnnnnnnnnnnnnnnnnnnnnnnnnnnnnnnnnnnnnnnnnnnnnnnnnnnnnnnnnnnnnnnnnnnnnnnnnnnnnnnnnnnnnnnnnnnnnnnnnnnnnnnnnnnnnnnnnnnnnnnnnnnnnnnnnnnnnnnnnnnnnnnnnnnnnnnnnnnnnnnnnnnnnnnnnnnnnnnnnnnnnnnnnnnnnnnnnnnnnnnnnnnnnnnnnnnnnnnnnnnnnnnnnnnnnnnnnnnnnnnnnnnnnnnnnnnnnnnnnnnnnnnnnnnnnnnnnnnnnnnnnnnnnnnnnnnnnnnnnnnnnnnnnnnnnnnnnnnnnnnnnnnnnnnnnnnnnnnnnnnnnnnnnnnnnnnnnnnnnnnnnnnnnnnnnnnnnnnnnnnnnnnnnnnnnnnnnnnnnnnnnnnnnnnnnnnnnnnnnnnnnncctaattttgcttcactgtctgtgaaaagaattatctgtatcttttgcatgtaagacaaatctcaatgaaaagggtgcttaaatagaagttaacactattttaaagcaagaatggaagtggtttcatcatgcgtaaacaacaactctccacattttgtaatgattgatctggatgcaatttgtcatcagacaggagaagtcgaaagcaaagaaataacactgggagatagagaagctctttcattcaatgcgaaaggtcaaaggcacatcagtttctttaataatgcaaacctcagcacacattatcagtgtcctcattattattgscttgtttatttcccactgctcattgataatttcaaygtgaaatttacctgtattgctgcatgcatcttgcagtttaagaagtgaagtaacccaatttcaaagctagtgctttagggaaaatattggattgtatttacttcaagcagagttcgataatttatgtacataataaaaattttaaatcccttasttaatatagcagttgccaaaactgggctattatcattctaaactaccaacccaaatggtagtgggtatctaatctacctctagaaagaaaatggactgtatttgctctatgtatttttcttgtacagcttgccatcgagacatttataaaggagttgatatgagaggagtcaattttaatgtgtctaaggttagcagtgttgaagaatgccaaaaaaggtgcaccartaacattcgctgccagtttttttcatatgccacgcaaacatttcacaaggcagagtaccggtgagtacaattcaaggtgtgtgttctttgtattggtgcctccaggatttcactgtattcttcttaacctcttttgttcccaaactaaaaaccaaacagggcttttattctaaccactttcctcatttacttactctattttatttttttatcttttatttatttatttatttattgagatggagtcgcgctctgtcgcccaggctagagtgcagtggcgtaatctcgactcactacaacctccgcttcccgggttcaagcgattctcctgcctcagcctcccgagtagctgggattacaggcgtccgccaccatgcctggctaatttttgtatttttagtagagtcggggttttactatgttggtcaggctggtctcgaactcctgatcttgtgatccacccacctcagcctcccaaagcgctgggattacaggcatgagccactgcggcctcgcccttcattttttaattaaaataattcatttaatttcatttgtttctctactcttttcccctggcatgtaattgtaccgcatcttcaaagcctgacatcctcttcccctacttctccaaagctgattcttgcaggtctttcctcaaataccgtcccctccaaaagcccatttctgagcattctcttttaagtcacactcagctctgtttatttcattcatagagctaatcacaatttgatattaacttgtgatttttttccttatttttaaatcttatttttatttgcatagatgtatggggtacaagtgtaattttgttactttgatgtattttacagtggtaaagtctgggcttttggtatatccatcactggagtcatgtacattgtacccactaagctatttttcaacgcccgcccccttcccacctctctgtcaccttcccagtctctactgtctatcgctccatgctctactcaattttggtgtcattttttcctgaagcaaaattttggtgtcattttttctgaagtcattttctgaagtctgtgtcatttttcgctttcctgaagcgaattttggtgtcatttttcctgaagttccgtttgccccacacataggccttgcttatagaatgagggtttagtgtcacggagtctcctgcctcattctcaccctaacttttcctttacccctttgcgaggggaaggatgtccattaggttaataatgcagacccctaacccactcattatcagggtcattgtttttccactgtgcattttaatactaactgttacctgcactgctccctgcccctcaaagtgcagaaagcaaagtaacctcttttcttcccattcaggaacaattgcctattaaagtacagtcccggaggaacacctaccgctataaaggtgctgagtaacgtggaatctggattctcactgaagccctgtgccctttcagaaattggtaattgtaggactacttcactttgtgattgtggtaggtggaataggagcccccagagacgtccctgtgctgagccctgggacctgtgcgtgtgttcccatagctggcaaaagcgtttctgtcaatggcatgcagttacgggcttcgagatggggagtttactctggattttctgaatgggcccaatgtactcacagggttgagtgctcacaaggctcataagaaaaagagagaggcggaaggctcagagccagagagagaggtttgaaggtattacactgctggctttgaagatgaaggtccgtgagccaaggaatgcaggcggcctctagaagttgaaaagggcgaggaaagagtttccctgtggagcgtcctggaggaagaagccctgctgatgtcttgattttagcccagtaagacccaatctctagaacagtaagataattaatcatgtgttgtttttaaccactaagtttgtggttatgcccnnnnnnnnnnnnnnnnnnnnattatgtctgacagaagggaagaaatgaccacggtggccttctcagaccctgtgggaaaggcctctacccatccagtgaaagtgtctacccagaccaagaggtattttagtttcctgactccgggtatgtgagtaaagtcaatctgccagtcctgggcgggggcaaatccccgagcttgatgtgtagggaagggagggggcctgagcaatccctgaggaggagtgagtagcagatggaacactgagcagttattttttgaggatagatttttacgacggaaaggaaaagtgaggttttaagaggtgggttagtggcttgtaacttacatggaagagtttatgaaatgatgacagaatagaatgggcctgtgaggctggaggagatattttccttggtccaagaattatttgccttgtgtgggaagagattgataggtggaagtttcaatgggggagtagatgggagtgacagatgaggaagaaaaaaactggctgtgagggatagaagttggaatgctcgctgcttttttagctaccttatcagcataggcattgtcctgagcagtgggatctgatgccttttggtggcccttgcagtgaatggcttcagcttcctttggaagtaaagtggccttgagaggagtttttattaaagaggcattaagatggagaacccttgtgtagtgaggaaacctccttcagcccatataaccgcatggtggtgcagaatatggaaggcatatttagagtcagtataaatattgacacgtagtccctttgcaagagtgagggcctgagttaaggcaatgagttcagcttgctgagaggtagtggagcggggcagagcagtagcctcagtgatagatgtggaagatactacagcatagcctgcctttgctggtgagtggtgattaggcctggtggaactgccatcaataaaccaagtgtgatcagggtaaggaacaggaaagaaggaaatatggggaaatggagtggatgtcaggtggatcagagagatacagtcatgggggtgggggccagcctaaaacagtaaggtcaagttgtttgaacagaaaggctacagggcgyggtcctggctcttgtgtaagaattttgactgcgcagccctgcacttcggctgtgtgtaatgaaaagggttgggatgagttagggagagctagtgtgggagcagtttctagggctgtttttaaggaatggcaagaggagtggctaaaggatttaggatctttggggtcagctagctttgcttttgtgagtttatataatggtttagtcaggatggtaaaactwagtatccaaaggcggaagtacttaaccatacctaggaagaaaaggagttgttttgtagaaggggttggggtttgggagatgagccagacacartcagcagggagagcacatgtgttttcatgaagaattatgccgagataggtaatggatgaggaagaaatttgggcttgactgaagtaatgggggctgtcctcgaagccttgtggcagtacagcccaagtaagttgctgaggctgacgggtgtcagggtcagtccaagtgaaagcgaagagaggctgggatgaagggtgcaaaggaatagtaaagaaagcatgtttgagatccagaacagaataatgggttgtggagggaggtattgaggataggagagtatatggctttggtaccatggggtgaataggcaagacaatttggttaatgaggcacagatcctgaactaacctgtaaggcttgtccggtttttggacaggtaaaatgggggaattgtaaggagagtttataggcttcaaaaggccacgctgtaacaggtgagtgataacaggctttaatccttttaaagcatgctgtgggatgggatattggcattgagcggggtaagtgtgattaggttttaatgggatggtaaggggtgcacgataggttgccaaggagggagcagaggtgtcctatacttgtggattaaggtggggacacacaaggggaggatgtgaaggaggctttgaactggggaaagggtggcattgaggtgtggctgtggcctaagaacagtcagggaagcggataattgagttaaaatgcctcgacctagtaagggagctgggcaggtggtgataactaaaaaggagtgcataaaagaatgttgtccaagttggcaccagagttggggagttttaagaggtttagaagcctggcggtcaatacctacaacagttatggaggcaagggaaacaggcccttgaaaagaacgtaatgtggagtgggtagcctctgtattaattaagaaggggatggatttaccctccactgtaagagttacctaaagcatctgtgatggtccaggaggcttctaaggtgatcgggcagcgtcagtcttcagccgctaagccaagaagatctgggaagcagtcagtcagagagccttgggccagagttccaggggctctgggagtggcagccaggccagttagacagtccgatttctagtggggtcccacacagatgagacacagcttaggaggaatcccaggctgcgggcattccttggcccattggccagatttctggcacttgaaacaagatcctgatggaggaggtcctgtaggaatgcttgaccactgcagtttaggcattttgaagtttttgtgtgtgstggagatgtggctgggttttgtctcacagcagaggcaaggaatcrcaactcagaaatacattgctacttggctgcctctattattgtacaccttgaaggcgaggttaattaagtcctcttgtggggtttgagggctggaatctaatttttggagttttttgttttttgttttttgttttttkttttttaatgtcaggagctgactgggtgataaaatgcatattgagaataagaggccttctgacccttctgggtctagggctgtaaagcgtctcagggttgctgccaaacgggccatgaactgggctgggtttttcatatttgatgaaaaagagcctaaacgctaactgatttgggagaggtcggataaataaaaaggaacattaatcttgactatgcctttagctccaaccacctctttaagaggaaattgttgggcaggtgggggagggctagtcgtggaatgaaactgtaagctggaccgggtgtgaggaggggaggtgatagaaggattatagggtggaggagcagaggctgaggaagaattgggatctggcttggcctggcaaggagcagcctggggaggaggggagaggtcagatgggtccatagaaaaggaggattggaaagactcagcaacacttggggttgggattgagaggacagatgggttgggattgaggggacagatgggagggaaagaaggaagatttgggacaagttgcattgggaacagagactagggagggaccaatgtgtaaaagaatgcctggacgtcaggcacctcagaccgtttgcccattttatgacaagaattatctagatcttgtaggatggaaaaatcgaaagtgccgttttctggctatttggaaccattgtygagtttgtattggggttaagcagcattgcagaagaaaataaggcatttaggttttaggtcaggtgtgagttgaagaggttttaagttcttgagaacataggctaagggagaagaaggaggaatggagggtggaaagttgcctatagtgaaggaggcaagcccagagaaaagagagggtagagacatggagagaaggggtsggggggtgcttgcccccaggaaagtggttcttgccactaagggtgaaggatcaaggcaggcattcgcgcggtgatcagatacctctgaaacgtgggtgaataatcaagcaggtgtccctgcagtgattaaacagcaaggaaagactatcttcccaagtccatgaccagtgccagagttttgggttcatggataaaacgcgtctcctctgtctctaccagaaaatgaaaggaattgaaattaagagaagggagagattgaaggatggcgccaagattgaaaggaaaaagaggttgagggatagggagagaggttggataagagagtaaaaagaggctgcttacccaatttaaaatcggtgagatgttccttgggcttgttggtctgaggaccagaggtcatgggtggatctttctcatggagcaaagagcagggggacaggggattgatttcccaagggaggtcccctgatctgagtcacagcaccaaatatcacgtgtgtccatgcgaagagaccaccaaacaggctttgtgtgagcaagaaagctttttaatcayctgggtgcaggcgggctgagtccaaaaagagagtcagtgaagggagataggggtggggacgttttataggatttgggtaggtagtggaaaattacagtcaaagggggttgttctctggcgggcaggggtggggggtcacaaggtgctcagtgggggagcttctgagccaggagaaggaatttcacaaggtaacgtcatcagttaaggcaggaaccggccattttcacttcttttgtcattcttcagttacttcaggccatctggatgtatgcatgtaggcttgggcccagaggcctgacatttaacatggataaatgtaaagttcttagaatcatacatacacwttggaaaagatggggcttaatcgcactttataagacttgaaggatgtttgagaatcactatgaaactgctgaaaataccaagaaaatttaattcttatgtatataaataatgtgtctgttttacatgaatcccttctacaagcttggtatttaatatggcatatattgttttttcatagtagatttaaaatttttgatatctaatttagataacataaaattaaccctttgaaagtgtacaactccgtggtttttagtatatccacctgattgcacaacgatcaccactgtctagttccagaacatttttatcaccacaaaagaaaggctgtatccaggcygggcacggtggctcacgcctgtaatcccagcactttgggaggcygaggcgggcggatcacggggtcaggagattgaaaccatcctgggtaacacggtgaagccctatctgtactaaagatacaaaaaaattagctgggcatgrtggcagatgcctgtagtcccagctactcaggaggctgaggcaggagaatggcctgaacccaggaagcggagcttgcagtgagccaagattgcgccactgcactccagcctgggcgacagagcaagactccatctcacaaaaaaataataaaaataaaataaaaaaaaaaaagaaaggctgtctttctcctttcccattggccrtctttctccattccctactcctccaatcccctggcaaccactaaatctactttccatgtctgtggacttgactcttcgggacattttacataaatggaatcatgcaatgcagcacattttgcatctggcttttttcacctggcgtgttttcaaggctcattcgtattctagcatatatcartactttgttcctatttaggactaaataagattctattgtatgaataaaacatattttgtttatatacttagtttgatgaacatttgagttgtttctggatttttttttttttttttttgcctcttatgaataatgctgctatggacaacagtttttgggtaggcatgcattttaaattctcttatgtatatacttaggattaaaattgctggatcacagagtaactccatgtttaactttttgatgaattgccaaactgtttttgagagcagctacacaatgttacattcttaccagcaacaattgagggcttcagtctctctacaaccttaacaacacttgttattgtctttgtaattattgcctttctaggcagtgtgaagtggtgtctcactgtggttttgatatgcatttccctaatgactaacaatgttgtgtatcttttcgtgtgctcattttcaatttgaatacattctttgggaaaatctctgtttaaatcttttggccattaaaaataattgggttattttcattgttgagttgtatgaactctttatatactctggatactacactcttatgacatatattattttcaaaaattttctgtgcatctgcaggtcatcttttcactttactgatggtgttctttgaagcaccaaagtttttaaacttgatgaaatccagtctggctttattcttgcacgtgctttacctaaaacgccaaaacctaattcatggttttgaagatttttgcttatgatttgttcttagaggtttatagttttagctcttacatttaggcatttgatgcattttaaattaaattttgtatatggtgtaaagtagcaatccaacttaattcttgcatgtgggtattcagttattccattgycttgaaacccttttcaaaatcaattgtctataaatgtaagagtttatttttggaccatcagttctatcctgttgacctatatatgcctatcctaatgccagttacacacagtyttgattaccataactttgcagtaagttttgaactcagacagtctgagtgcttttattttgtcctttttcaagattaatttggttattcyggatcttttgcatttccatatgaattttaggatggttgtcaatttctgcaatagaaaagcagcaggattttgatagagagtgcattgaatctgtagaccaatgagtatcaatggaattatgtgttatcaaatttagtaaactacataaacgatatgtacacaactaaaacaaaactaagatataagatcatattaatgtaatgataataaaagtggattgtctcctgttctaattttaataggcacaaggcatttttgttaatcacttcttattaaagaattttttataatattcaggaaaatacaacaaaaaaacccttacattcctaaggcctcagagtcagagtaatataaaggaaatgtaaacacatgctgagtaatgcaagcatttggcaatggtggtgactggagctgggagcacagcttttatttctctgaaataggaatttgccccttagagttagaccaattttgccttcctctaaatggcaaacagtttggagatactttaaaggacattttttcacttaggatgtttagtactatgaataataaatagtcacaatttccttaactatggtgacaaaatacaagcaaattyagcctcrtgtcatttcctaaggaacatcttctctctgtgagttcacaggttgccamatgaacatcttccagcatcttgmgttctcagatgtggatgttgccagggttctcactccagatgcttttgtgtgtcggaccatctgcacctatcaccccaactgcctcttctttacattctatacaaatgtatggaaaatcgagtcacaaaggcgagtatgcatggaaaatcgcatcacaaaggcgagtatgcatggggagcacttgctgctgtactttcatcacttttatagtctgagttcttaaaagtttcgttcatttccctcaaaacacttgaacctgcagtttcagtaggtactgttctgccaggtgcagattagttaagagattagcagacttctctgcctatcttctcttactttaaaacaaatgttaccattgaatcaaggaagcaatagccatgagaaaaaagaaggatctgacgcctttgaatgaagattcaaaacatgatcttcatgttttgtattagcttggagtaaaatccacttgctggcaatatagcccttaagcttgttgcctcttctctttgtttcagaaactagagccctgtttattctgatcaaggctctggcccactgtctttatctcagataacccaccctcttctgcacacagcatggagctaagagaagggtgtctagttatgtaatatcatcggcagcataaattcccagaatttgttctttgatttttttgtttgtttttccagttagaaggtggaacttcatcattgtcctcttttcaggttgtctgtgcctattagttttctccagagggagaggtggcttgatttacatttaatctctgcaatttattagagtcctgtagttggatttactttgaagagagtttcccagaagaataaaatttgctgcrttgctttttgggtgtgagctgcttttgtatttgcctaatgcctttaatgcaaatttctttctttctctcttgcttttttttaaaaaaaatagaaatgtttgtcttcttaaaacatctgaaagtggcacaccaagttcctctactcctcaagaaaacaccatatctggatatagccttttaacctgcaaaagaactttacctggtaatgtgatttgataataatattacataaaatgtaacctatttcatgacttttaacagcaacagtgatgaaacaatcctcaaggtaacagaaacttgtgtaaatgtcgttcattgcttttcccatctgatatctttttgtgtttataattgacacagaaccctgccattctaaaatttacccgggagttgactttggaggagaagaattgaatgtgactkttgttaaaggagtgaatgtttgccaagagacttgcacaaagatgattcgctgtcagtttttcacttattctttactcccagaagactgtaaggaagagaagtaaaggaaattttatttttcaaagacagttgacatgaccatttcatattctctttccccctgtgaaggcttactctttctactgttcatttcatctaggtgtaagtgtttcttaagattatctatggatggttctccaactaggattgcgtatgggacacaagggagctctggttactctttgagattgtgtaacactggggacaackctggtgagtaacctcactttttcgtggacctgtcagggatgtctgtcatgttgatagtttgcttagtcttaaggaattatgtgtcttgttctccttggttagaagggactttgattcacttctaattccaaccattagcgtcaacgctctcttttcagtctgcacaacaaaaacaagcacacgcattgttggaggaacaaactcttcttggggagagtggccctggyaggtgagcctgcaggtgaagctgacagctcagaggcacctgtgtggagggtcactcataggacaccagtgggtcctcactgctgcccactgctttgatgggtaagtgttggatgcatctcatccagagtcttatcttggcttttcattttgaaggatctatgatcagctgcttcaccgccatgtgactttatgaatagagacgtgttaaagcggggatggtattcacaacatttaacttatagggtccaagcactgaccaacctgaccattagaacagagtgtggtctctgtacagggcagatggcrctgagtgggtattctccacagaaasagaaacgaagacagtaccccactcctccaacccaccacccaccaccaatcccaccaccaattccaccaccaatcctgccacccaccaccaatctcaccaccaatcccaccaccaatcctrccacccaccatcaatctcagcaccaatcccaccaccaatcccaccaccaatcccaccacctaccccaccaccaatcccgccacccacgaccaatcccaccaccgatcccgccaccaatcccaccaccaatcccaccaccaatcccaccacctaccccaccaccaatcccgccacccacgaccaatcccaccaccgatcccgccaccaaccaccaatcccaccaccaatcccaccaccaatccctgatgtgttcttcaaagacttatttgtcaggcccatagaaatgttacttcttgctctttgattcataaatatactaagtcataataatttttaaaagtgagagtttcgtactctgtatatttcaatgtatataatttgatctatttcaatttattggtcaaatagtagacatgttaggtaagtcttaaaatactgaggctttggagttagacagaacatggcttaagtgacagctttgctgcttattagaggtgtggccctagaagatttgtaaatccctctgagctttatttgatctaaaatatgaatagtaatagtcccgaatttgtaacgttgttgggaagattaagtgacacatttaaaatgcttagtactgtgtgtagaacataaacacttcaaaaaatgtaaactgtgatttctatattcaataagaaatgtagmaatggacaaagcatataaaaagcaaaagaaatactagaagacacttgatttttctcaaaaataaacacaccaagtatttttgttttagtgaaattcatgcttacatgctgtatactaggattgaacatactgccaccaaaatatagcagtcggtggtacatgtgggtggagcaagacccctccaccttgtcatcgtgtgaaggggctctgccatacatgaccttgcatgtgactttaaggtggttggcctggaagaaaagtcccaagatgggaaatagtaggtgtcttttttactaaatgcactccaatttgggaccaaraattttcattcttgaaggctcagtattgtgagtttataagagataatagacataaaagtgtaatgatttcattgcaaataaaaaaaggcccctttgcacctgatatctccatcatttttctagaattttgtgcacacatgccttgcactacttggtgatgataaagatttccagatctttgcacagaataaggctttgctttagatcagaattttggatgtacttagtatacattcatcttttaaataatctatttacattttcatactttccaaaatacagatatattttattttatttatatatttatttaatttattttttgagatggagtctctctctgttgcccagagtagagtgcagtggcacaatcttggttcactgcagcctctgcctcccgggttcaagcgattctcctgcctcagcctcctgagtagctgggattacaggcgcgcgccacacctggctaatttttgtatttttagtagagacgrggtttcatcatgttggtcaggctggtctcgaactcctggcctcaagggatccacccayctcggcctcccgaagtgctgggattacaggtgtgggccactgtgcccagctgtatagagatattttaaacaacactaaagtcctcctactttgactaattagaagagcattagaagatcagcctgacttcttgacagttctgaatttagtggagcaatgaggttcagctttggtgaatgagcttaatttttccatgataaactgctagtttcttcccactayagtgtctctcaaaaatgggacagcaacattctttttgttttcacttgcagtaagcatgatgcaattacataaatgtacacttttcaatttgttaaatagaatcttcagagattcactactgccgctattggtgatgaaaaattaccagaaggaggaattaggtaggagaaaatgtgtcctatgtatttccttcccagttctttgaaagagagtgataggaaaaaggaacactattgaaggaaggactgcccagtttcaaacaggwatttatttttctcycctaggcttcccctgcaggatgtttggcgcatctatagtggcattttaaatctgtcagacattacaaaagatacacctttctcacaaataaaagagattattattcaccaaaactataaagtctcagaagggaatcatgatatcgccttgataaaactccaggctcctttgaattacactggtatgtagcatatgtaagaaggtggagagcagaattgcgctggttgatattttcatatcagtttgaacaagagggcagacctagagagactgtcgtcgttttctgactggtggagttgagggaaacgtgagggttgctgggaagtgaagaccccgcgacttgccgtgaaatctcttctacttaaagagcaagacatgtgaattaattctttcagggagggatacaactgcatgcaggtgatggaaataatgggcgtgggaaatgtctgtgccgtctgagaggcactgggcttgctttgacaagagtagcagaactgtcattgctttgggcttagggatattcgaatgtgtgagggcaagtgggatcagatatctacttccaggtataatttgggtaggaaagagactcatgcagaaagaagccctggaaggccagagcatcgtggtcagaggtgttgcctttggagggtcattgctgccaggagccgaatacccactgtatccaataacattcatggtcaggaatggtggctcacacctgtaatcccaacactttgggatgcccaggtgggaggattgcttgaggccaggagtttgagaccagcctgggcaacacagtgagaccccgtctctacataaaattagaaaaaaacaattaactgggtgtggtggtgtgcacctgtagtcccagctagtcaagaggctgagayaagaggatctcttgagcccaggagctcaaggctgtagtgagccaagatcgtgccactgcacacaaacaattatgtgacctcgggcaagttgctttacctctttacacctcttaatttccttatctgtaaaatgaggatgataatttcttcctgggtctgttgtaataattaatacatcaaagcacttcatgtctggaacagtgaagayaccctgctatgactattaaggatagtatacatggaataagacacaggaacttctaaatgcttttgaccatagatttaggttctgagttttaagaatttaactcaggaaattgtaacaccaaaaatgtcatgtgaaaaatggtggtgacaaattttcttgaatcattagccttagaggttgggcagaaagcaaaaaattattcttgatgctactctatagaaagagaagacagaaaaagagaaagatgtatttttaaagtctatatccataactttatttgaccaaactctaatttaaaaattatgtttcagaattccaaaaaccaatatgcctaccttccaaaggtgacacaagcacaatttataccaactgttgggtaaccggatggggcttctcgaaggagaaaggtaagcatgacgctttaaatattgcttctagagtaagtctcacatgttgaaatacatggagtgggtcgttttaatcggtttctgtctgaaattatatckaaactctttatctttcctatctatttattcccaaatatttattcagttattcttaaaaaatgtatttttgctttggcttgaaaaaaaattttagggagacttttaagcatcttacttcattataaagatcagttgcttgactttgcatgaagcagattgggcccttctagggctgacaagcccgtgcaagaccacccgctcctcagtgttagtagcgttcccgtctcccaaaaccatgttctcccttgatgctaatggccgggagcacaggcaggtgtgtcgtctcactatggagaataatatttgtgtcattctttacagaagaaggtagcttgccaaactgtctccatctttcccgattcagtcttttgttcaagtaattcacatttttagattttttattggtaatctgagacaagaagaaatttaaagtaatcttcactaagccatgaaagctcccaacattgttctccrtgagagatgctggcctgcatttattcaaaaacaaaagacccctctgttgccaaagctcggagggcttttcagaaacgatatagttgtaaattataattttgaatatataaagcaaaaaaatgaaaagtgagaacttccaggctttggattgttgtaggtgataaatataaaatgggatttctggggggctgctactgagwtgaggggatggcagaaaacatggaagcaaggtctctggtcagcccagggtgctgggcttgtcccaacaccacgtaggcaataagaggacagtacagggkgccgtctctctccctcttcctctctctgtctctctctctgtgtgtgtgtgtgtgtgtgtgtgtaacactaycttcccaatttttactgtctatttgtattcaaagataaggtccttatgaaaaatacactgctctgattcactttaaaacttatttccatatttattatttattgtgggaataayaatattcccaatattattatttattatttaagttattattattaacttccctctgaggttatatattggttactcacaggtgaaatccaaaatattctacaaaaggtaaatattcctttggtaacaaatgaagaatgccagaaaagatatcaagattataaaataacccaacrgatggtctgtgctggctataaagaagggggaaaagatgcttgtaaggtaactcatgagattatgaaaaacacaataggctgcttgagaaaattcatttcaaaatatattttccaatagcataattyaatcatagtttttwaaaaaattcagagacaaatgatctgataaattgataagcaacttttaacaaattgaatatacataatatatatttatattatttatgatatatgtcacaatctatgcatgtgctatttaagaggggcaaatatacatgcaataattgtgctagaatataaaaacattagacttctttrtcattgggatgatgatatcaagatttctttgttagatttatttcagatagaaaaggggatacgaaaaatgcaggcacatgagatacttggagaactttaagaaagagtgagtgtgtgtgtgtgtgtgtgtgtgtgtgtgtgtgtctggcaagcaaggtcttgcacacacrcagcactttgggaggccaatgcaggtggatcacttgagcctaggaatttgagaccagtctgggcaatgtgatgaaacccatctctacaaaaaaatatgaaagtatctgtgtgtgtgtgttgctgtgtagtggactacagaactttagaggcagtcacttatttgaaycccattgycgtaactttctactattttatttttccactgtgactcagggagattcaggtggtcccttagtttgcaaacacaayggaatgtggcgtttggtgggcatcaccagctggggtgaaggctgtgcccgcagggagcaacctggtgtctacaccaaagtcgctgagtacatggactggattttagagamaacacagagcagtgatggaaaagctcagatgcagtcaccagcatgagaagcagtccagagtctaggcaatttttacaacctgagttcaagtcaaattctgagcctggggggtcctcatctgcaaagcatggagagtggcatcttctttgcatcctaaggacgaaaracacagtgcactcagagctgctgaggacaatgtctggctgaagcccgctttcagcacgccgtaaccaggggctgacaatgcgaggtcgcaactgagatctccatgactgtgtgttgtgaaataaaatggtgaaagatcacgattagcaagtgttttcttctggttgtgaaacagaactgaaagtaagtggtcgaggttccagcacagttcctgggatccctctaattgcactgcttcctctggaactcagtatatctcaaagatgtaatttcctctccgtgctgcacctggtcggccactgaaacccactattgcccgcttcacgtgtggcaaagagctagcgggcttgggttttgttctgccgagaggaagggagaacacccacttttataagaaagagatgggttacctgaacccatgggcacctttgcctcttggcctcctaactttgctaccagggcatggctaggagggtccaggctgcgcgtgctgaggagctcgaggggctgcagcattgcacagccttcatggcaggcaaggaatctgctttgcaaggggcattagccctggaggctcagtggatatgggctattgcaatagtaattcaaggagcatttttaggcctggcatggtggctcacgcctgtaattccaacagtttaggagatcaaggcaggtggatcacttgagcataggagttcgagactagcctggccaatgtgacgaaaccccatctccacaaaaattagctgggcatggtggtgcgcacctgtaatcccagctcccccagaagctgaggcaggaggaccgcttgagcccggggatgtcgtggctgcagtgagctgagatggcaccactgcatcactgcattccagcctgggcaacagagtgagactgtctcaaaaaaaggaagcattgttaggtataaattattattattattattattagtagtagtagtagtagtagtagtactgagacggagtcttgctctgttgcccaggctggagtgcagtggtgcaatcttggctcactgcaatctctgcctcccgggttcacgccattctcctgcctcagcctccggagtagctgggactacaggcacccgccactgtgcttggctaattttttgtatttttagtagagacgggtttcaccatgttagccagaatggtctcgatctgctgaccttgtgatccacccgcctcggcctcccaaagtgctgggattacaggcttgagccaccacaccgagccctgttaggtataaattatttcataaaattcagacttgtaaatttatggtagcctttggaatgggtgatagatgtcctatgccacacaaattcctcacatgccgaggctcaccgtaactgataccagctcgcttgattcagttcagttaaactgaacaacatttacacagaattggcgatttacaaaatcttatgtaagttaagtagaaaaacagaaaaaagttttctgaaagagtttgggtttttccttcaatgctcaagacagaggtccccaacctttttggcaccagggaccagttttgtggaagacagtttttccatggaccagcatggtggtgggggatgattctggaatgattcaagtgcatgacatttattatgcactttatttctattattactacattgtaatatataatgaaataattatgcaactcaccataatgtagaatcagtgggagctctgagcttgttttcctgcaactagacagtcccatctgagggtgatgggagacagtgacagatcatcaggcattagattctcataaggagcctagatccctcacatgtgcagttcataacagggtttgagctcctatgagagtctcatgctgctgcggatctggcaggaggcagagctcaggcggttatgcttgctggcctgccactcacctcctgctgtgcggcctggctgctaacaggccatggaccaggtactgttctgggccccgggggttgggaacccctgctcagagacacaccgggtggtaggaggagctaaaggtggagaggctgaaggaaaatatgaggtctgggctatccacaaaccagatagcaggaaactgaagagttaaacatttacttcagaattgaatggcttttgtaaaatctggctagattccatgaaacgattttaaaaatgcactatttaaattttgcctttgcatgcgatgaagacattagtctttgttcatgtggatgtttttttatgtttaaaagggaaaaaatggtttgcaatgaaacttttatctcagtctttgagtattgatcatggggtgttggaacaggactttggaatgcttgcagggtaaacctttggcctctgttagtcagggaatgaccyagtttggcaaaacagaggagagttttgaaatatggaactttcccgaggcatacattgtcattttaaagtggtcaatcaaagcccagtaggactgggctggtgtcttggtgactcactgtgtgctcatatacaggggtaactgaggagcccttcacacaggtctagcctcgtgggactaaaaagtgtgacatgggctaggaaaatgcgaggctgggatgccttcactcccatgaggaagcgtgacgggaggaggcgtgggccactggcagttctacttcacaaaggctgctggcagtgtcaatcctgcaagctggccttgccctcctgtggcggcagtgtacacgtggcatgcaagcacatgcacaagccacctggctccaaggtcagccaagggctccaacatctgtctcagtccctgccaaggcatgggaaccccccacgtaaacttggaacttttcctttcaattgttgcttatgtctgtcactttacttgactgtgagcagcttctagggaggctctctcattcatagtgcatatcatgggcatccagtaaacggctaatgatgatgatacacctttattacaaaaataaaggcaatggagactgaagaggtgaaatgattagctcaaggtcactggcaaggacagagctggaacaaagctcagcattcctatgccaggcaatgtcctctcactgatatccggttgcttctcactaggagaaggatgaaagatgacagagcatttataaccaccatttgttattttcattatcaactgacactggtgtttctcygcccggagcgattttgtcctcccttcacctcaggaaacattcggcaacgtctagagacacttttggttgtcctaatgggagagggtatgcaactggctgtagtgggtagaggccagggatgcagctaaacatcctgcagtgtgtgggacagcccctcgcaagagagagttatcctgccccaatatcaataatgccagggttgggaaagcctgatctcatgtcagcattaaaaccttgtaatgaaaagaggacatttcggccgggcgcggtggctcacgcctggaatcccagcactttgggaggctgaggtgggcggatcgcgagatcaggagatcgagactatcctggctaacacggtgaaaccccgtctctacttaaaatacaaaaaaaaaaaattagccgggcgtggtggcaggcacctgcagtcccagctactcgggaggttgaggcaggagaatggcgtgaacccgggaggtggagcttgcagtgagccgagatcacaccactgcactccagcctgggcgacagagcgagactccgtctcaaaaaaaaaaaaaaaaaaaaagaaaaagaaaaacaaaagaggacatttcaggaacagcaagaaaggggttgtaggacatggcgggctgtgccctttctcttcctttattttttactttttgatacattctatttgtacatatttgtggggcacatgtgaaattgtgttatgtgcatagaatgtgtaatgatcaagtcaggatgttggcatacccatcacccaaccatttctatgtgttgagtacatttcaagtccttttctagctatttagaaaactataataccttgttgttcactgcagtcaccctactcttctgtcaaacattagaaagcattccttctatctaactctgtggttgtaccccttcaccaacctctcttcgtcctcaccaccccccccacacacacacacccttcccagcctctcgtaaccaccatatactctctacggccatgaaatcatctttcgtgggatcacgcaatgtttgtctttctgtgcttggcttactttacttaacataatgacctccagttccatccacattgctgcaaatggaatgatttccttcttttttattgtgtccattttcaaagcaagttctgaaagacaagagaaggagctctgagagttgattatggccatgcctgagaaggggtctcagtcaactaatgccgttgtggacattcctgtcccaagcagaaggctttaggtcacaatatgtccaaatgtccaatacatctcccacctatgatccattggaaagaaaacaaacctcgggacccccaaaatcactaagccacatggaaaagtaaagctgggaactgcattgggcaaaccttcctcccattctattcctaaataaaatagctttcttaagctataaaaaaccttttttaagctttaaaaaggttttaaaaagctacattcctcacaatttgcccatgaggaaattccttgtggaaaaaggacaggcagaagtcagagtcacccctctgctgacatgagacaggtgcgtatctgattgcctcgtttgccatattgtttcactgggccacactaaggcatgagtgactattcttgtaaattgcgtatttggtgaaaggctaattggaaactcgaaaaaatgcttctgtttgtctcttatctacctatgacctggaagcccccttcccttcttcgagttgtcccaccttttaggaccaaaccaatgtacatcttgcatagattgattgatgtcttatatctccctaaaatgtacaaaatcagcttgggccctgaccaccttggacacatgtcatcaggacctcatgaggctgtgtcataggtacatccttatccttggcaaaataaactttctaaattgattgggacctgtctcagatactttttgatttagaatcctaacttctgacttgtacttgggtctctgcagactaacttctatattcttcctaagactttgtctagttattcctcattttcatcagtcttcgaatattcaaaaacatttcatttcattgaaaaaaaattgaaaaaagtagttgatatcagaattttaaactgcaatgcattagttgaaaataattttttaaggatatctatggtcagtttaaaagaaaggtctatttaatctcaaagagtttctatgtagtcaagacttttattctaggctgggcacggtggctcatgcctgtaattccagcacttgggaggccaaggcaggtggatcgcttgtgcccaggcattccagaccagcttggggaacacagcaaaaccctgtctctacaaaaaatacaacaattagccatgcggagtgacatgcggctgtattcctagctattcaggaggctgaggtgggaggatcacctggtggctgcgttgagtggagatcacaccactgtactctcgtctgggcgacaggagtgagaccttgtctgaaaaaaaattattctacttttatttgaatagacaaaatttttttgaatcctgatactatttcaaagaccttaaagatttcactaactagctaaatcaaacttaggaaaatattatttggttttccagtgaagcatttctcttatttagagcctttctgtttctctcaatagggttggagagttatccttatcttctttttattggggcttaagaagagagatgaggttccatggagtaaacaatwcaaggatataaggacctcatataatctcacgtatccattttccatgaaagccattcttggcacgaatttgccattctatgtttgagcctcataaaaggcaatgcatcataaatatgcactttttgggtagctggaatgtactttaaacgggaaactcaagaaaacagctaggaactctttatgccaggataagtcaaatgcactggcaatagatcaaataaaaatatctgagtaaatgccttccaga

SEQ ID NO: 5616 - DNA, 73764 bp, Homo sapiens
  misc_feature (1)...(73764): n = A,T,C or G, or insertion/deletion polymorphism (see Tables 1-2)
gagctcaagatcagcctgggcgatatggtgaaaccacatctctacaaaaactataaaaatcaaccaagtgtggtggtgtgcacctgtagtcccagctgctttggaagcttaggtgggaggatctcttgagcctggaaggttgaggctgcagtgagttgtgttcaagccactgcattccagcctgggtgacaaagtgagaccctgtctcaaaaagaaaagaaaagaaaagaaaaatagtagcaggatgagatggtgcctgagagttcctaggacaggaactgtgcctcattcacccctgatcctcagtgcctggtataggctggcacatagtaggtattcagtaggttttggaattgaatgacgctgaaaagacattcagctctcaggtgcaaaagcaatgctatatgataattccagaatgtcagctccagcaagttcttcatagaccaacctgcctcatgttacaaatggggaaaccgagccccagagtgagaagtggatttgtgcaaactcacacagcaagtcagtggcagagttggtatgggagcccagatatatcccgactgctggttcagatcgtctcccactctgtcccaccatctatcaatccacctcctgacccttcctgtcctctgactttcaagatgtcagaaaccagcagattggagccaacaggaaatccccaagtgccttttagtagggtgaaggcattaggttacagggcgggcagatggggcgtcccattagtgaactgacactgggttcctgtaggttccattagtgtctccgatattgacccattagcacccactgaaagccggaagcacagggaccagggacctcagaggggatgagtcaccgagtaaatcagctttgatgaggctgagggagcagagttggagagacagaggagtctttcctctttccttggaaagtgggctcaaaagcagtaagagagtgcccagcagtatcagggatgataaggaccaggcacgactcagaatcatggcatttcggacctccagagaacccgatgaactgacccattctacagatgtaaaaaccgagcatctgagagaagaaatttgtctctgagttactcatggagaaccaaggtttcctgcctgtcacactatattatgggactcaagtgtgccctaggaattacagccaaaactacagtcactgtgctaactgctttacaaacattatttcattttttaattattattattattattatttttgagacagggttttgctctgtcacccaagctggagtgcaatggtgtgatcttggctcactgaaacctccgcctcccgggttcaagcgattctcctgcctcagcctcccgagtagctgggattacaggcgcccgcaatcacgcccggctgatttttgtatttttagtagagacgggttttcgccatgttgggcaggctggtctcaaactgctgacctcaggtgatccacccgcctcagcctcccaaagtgctgggattacaggtgtgaaccaccatgcccggcctatttcattttattctcatagcaatcctgggagataggtaccatcagcccgatttacaaagcaaaactgtcattcttctatgcagcagaaactgtctgctgagccctccaagggcatgctttttattgcaaacacttcaaggtgatattatcatcctgtttcacaggtggaaaacccaaggcacagtgaggccaagtgacctgccccatgtcacacacataaataatgtcagaaactcctgactgtttcaatgcaaagctaaagctctcagcctatccactacatgaatgtgatgaacaccacccccacattccacactatgacagctgtgtaatgtgccacctccgtgcttggcatccagactgattcatccacttattcatccgttcattcactcattcaacacacataatattgagctcctgccatgtgccaggcccctgattacaagaccaatgtagcttaccttccacttgggggacaggacagacagacaagcaattccagcatggtacaggtgaacattgaatgttatggcatgatctagacatatggggcagagaaggccaagttgagtcttgcaggacaaataagtgttgtccaggcaaagagaggagccaggaccagcacatacagaggccagaggcatacaagagcacccaagcagcaccacagggaaggggggatgagaggtggaactgcagattccagaagtggctggagtttggggtttagccaggagacaaatgggagccactgcgtggtatgaggcatggtagcatggatttgtacatagaaagcttggggtctggaggaaggatgcagtggggtaagaggtagatgcctagaggctggtttggtggagtttccagagataaggaaggtctttaatgattgattagatctaggagtgagaggtatggggaggtctggtttcttttcttttcttcttttcttttcttttttttttttttttttgagacggagtcttgctctgtagcccaggctggagtgcaatggcgtgatctcagctcactgcaatctccgcctcctaggttcaagtgattctcctgcctcagcctcccgagtagctgggattatagacacccaccaccatgcccagctaatttttgtatttttagtagagatgggggtttcaccatgttggccaggttggtctcaaactcctgacctcaggtgatcagcctgcctccgcctcccaaagtgctgggattacaggcatcagccaccatgcccagcttgcttgcttgcttgcttgcttccttcctttcttccttcctttcctccctccctccttccctccctccatccttccctccctccctccttcttttcttttctttttttcttttttctttttttcttcctttgtttcttctttttgagacaggggccaggggtgtttcattctgtcacccaggctggagtgtaatggcacaatcagctcaccacaacctcaaattcctgggctcaagcaatcctcctgactcagcctcccaagtagctgggaccatagccgcgtgccaccattcttggctaatttttttgtagcgatggggtcttgctatcttgttcaggctggtcttgaactcctgacttaaagagatcctccaactttggcctcccaaagtgccgggattactggagtgagccatggtgtctggctgtgggaggcctggtttctaacaggcatgataggcacatggtgggcgagggctgggaatgagacccctgcaagagaagtctggggaagagaggtaagttctattttagactcagtgagggtgagaggcctaagggtgtcccagggcctggatttcaggccattctctacagagcttgaaaggtttctaaaaaaaaaaaaaaaaaaaaaaagtgcacacaagcttcgtgatcactcacagacatccctgaggagaggtctagttagtggctggacacaggaatctggggttcagagaagtcagaactgaagaaataaacatggggtgattggcttatatgtactttttttttgagaaggagttccgctcttgttgcccaggctggagtgcaatggcacaatctcggctcactgcaacatctgcctcctgggttcaagcgattctcctgcctcagcctcccgagtagctgagattacaggcatgagccaccatgcccagttaattttgttttttttgtttgtttgtttttgtttttgtttttttttgagacggaatctcgctctgtcacccaggctggagtgcagtggtgcgatctcggctcactgcaagctccgcctcccgggttcatgccattctcctgcctcagcctcctgagtacctgggactacacgtgcctgccaccacgccaggctagttgttctgtatttttagtagagacagggtttcaccgtgttagccaggatggtcttgatctcctgacctcttgatctgcccgcctcggcctcccaaatgctgggattacaggcgtgaaccaccatgcccgggcataattttatatttttagtagcgacagggtttctccatgttggtcaggctggtctcgaactcaagacctcaggtgatctgcccaccttggcctcccaaattgctgggattacaggcgtgagccaccatgcccagcctatatgtgctcttaaatgtctcagcatgggaaggaatcactcaggagaagagcgttgacaaggaagagaagcagttccaggacctcacctggggggagcacattatattttcttgccaagtagaggaggaacctgtgaaggagagtgagaagcagcagccagtgaggcaggaggaaaaccaggacatttctgtgaaagaacaaaagctttgcaagaaagccttttaagtaagaggaagtaatataaaaccaatactagtggatgaatctgggtaagggaactgtctggggacagacagggctggaagggaggggaacaaaggacattggatttggggcccagatgaagttgaagatatgctggagggaggagtaaatgaatggcaggaggaggaagtgctggtcaaagagaacccctgaccttggaatttcagaggaagtgtgatgctaggatgggaggcagggacgtgatggtgggaggatggctgaggtgcgtggagggcaccattgattacagggactaagaaacagaggccacatgtcagtgggtccttcagctggaggctgaagtggtggtgacaggaataaagatgaagacagctgtgagccactctgaccagtgcagaaagtgaagtagagcttcctcttcaaagggactttccttcccgtctaattaggaataaacagtaacttctcttagaagcaaaatttattcaaagacctgtgctaacattcttagaaatctgctagccataataaagaaatcaatgtactttgtgttcttagcacccacattttagcctagatatttgccctggcgtgcttatactgatccaagcaagcagtaggtcatagcctgttcctcttccttattcggaggtgtttttacctttctcagcattccacaggttgcttcctccttcctttgttctcctctgcctttgcctctttcggaaagttctaaatgactagccaatcgggacaagtatagaatgtgaggtacccttccagccaacggaaactggacacagcagtagggtggatgcatcaggttataaatgaccctgtctcctttgttcgtgtgtgctcttgcgagaattactgatagtgatggcaccctttctgcagaaagtaaactagccttgctgagagatcctttgttttttatgacaccaagcacctgttcccaacaccagtgagggccacctccaagaagctggcaaaagagaggaacaagaagagttgtgggcaggaaagattgatgtaatgaacccacaggtggtaatgtgtttggaagaagggaggagaaagggattgcaagagccaggtgtggtggctcacacctgtaagctcaacactctgggaggccgaggagggcggatcacttgagctcaggagtttgagaccagtctgggcaacatggtgagatcccgtctgtaccaaaaatacaaaaacttagctgggcctggtggtgcccatcggtggtcccagctacttgggaggttgaggtggaagttaagctggagagtggggcattaggggggtgggggttgcagtgagccgagattgggccactgcactctaacctgggtgacatagtgaaaaaaaaaaaaagattgcaagagagtgaactgacctcccaggccctgatctacagggtgtgtgagaaaattaaaaacaggtggcaccggcctgtagtcccagctactcaggagaaagaggcgggaggatcgcttgagcccaggaggctgggtagagcctgcagagagctatgattacactactgcactccaggctgggtgaccctgtttccaacaacaacagcgacaacaaaacagattactttgaagggactagaaggaggacacagggtcctggaggaaggcagctggcaagttacagagcagaaaggtgaagggactgtccagggaagaggggaggctccagaagttatccttgaggaaccaacagcacggggtgggggttgggggggagctcatggaagggtggggaaactggggaaagggaaaactcgagtcagatcaggagtagagccctgacttgggggaacaagggtgcaggtgatggaagctgggagctgtgggaagcttgagcctgtagtgctgaagggtctacccattccatcaacagttcctctccagcaactgttctgagctgcacccttaaaaatatttgctattatttatttatttatttatttattttttgagacagtttcgctcttgctgcccaggctggagtgcaatggcgctatcttggctaaccacaacctccgcctcccgagttcaagcgattcttctgcctcagcctcccaagtagctgggattacaggcatgcaccaccatgccaggttaattttgtatttttagtagagrcagggtttctccatgttggtcaggctggtctagaactcccgacttcaggtgatccacccgcctcggcctcccaaagtgttgagattacagacgtgagccactgagaccccggcctgctaatatttttattatttctccaggctacaagagagggaatctcctgaattcctctggggcagccctcccaattcacccgggagaaaagcaggcaggggccgggctaggattccagaggggcgggaagccctggtggaatggggtagctggagccaagcaccccaggaatgccctcccggcctctcctcccgattccttatcagctacaagctcgagtttcctcagccacacgcgatcaaatgctgcttcagagctctaggaagctgggtgtgtcttctgtgctttgtaaaaaagaaacgaaaaaaacattagcaaatccccagcccaggyagccggctggctgagggcggactcttggaactgggcggtgggaggtgggggacgggggagggattggggggcccttgctccaaagccaaagagcgggaaacaggaactgcagggaggccactccgcaggcgcctcccctttcccgctggggagaggccgccgccgcgcggcgctcggcctgcaccgaccctccggggaccccgctaaacggaggagaccccaggcccggaggtgtcgcccctgggctgcgacccccgactttggccggcttctccctgcggagaaggaggcagcgccgggaccgggctgttagccacgtgctgggtggccttgggcagattgcctcctgtctctgggcctcagattttctcatctaaaaagagggggctggactcatttctgcaaggcccctcccggttggagcggttccctgcaattcccttccttctctgaacttgaaactcttycctcccccatccccttggggtggcccctggattatctgggtggtgcttatccagtctgccgccttgagagaaaatgttgccctgcagctgtgatttacagcagggctctgcaccctttttctttttttgtttttctttattttccctccttctttcctttttacatctagagtacacactttatgcacccttttcctataaagggtcagagagtaaatacttcgggttttgcaggccacactctctgtcacagctattcaactccgtcattgtagccaaggcagccatggataagacataaacgagtgggcatgatgtgtttccatgaagctttgtttattgcagctgacatttggattctcacaggtcaagaaatcgtattttacttattatttattttttttctgagacaagagtttcactcttgttgcccaggctggagtgcaatggcaggatatcggttcactgcaacctccacttcccaggttcaagtgattctcctgcctcagcctccctagtagctgggatwacaggcgcccaccaccacacccggctaattttgtgtatttttagtagagatggggtttcaccatgttggccaggctggtctcaaactcctgacctcaggtgatccayccayctcagtctcccaaagtgttggaattacaggcatgagccaccgcgtcaggccaagaaattgtattcttctttttatttttttcagccttttaaaccttggctgggtgcagtggctcatgtctgtaattccagcactttgggaggctaaggcaggaggatctattgagcccaggaattggagaccagcctgggacaacgtagagagaccctatctctacaaaaaattaaaacattaaaaaaattttaagatatactactgacatacctcagagcatagttgtgggaatgaagtgagaatacagatgaagctatcgcataaaggatattattctttgggaagttgttggtatgtatsctcagcagaagatgtggacttagagatttggatggtgtcttgctggccatccactcccaaaatttcgtgagcaaaggcactgtgtgtgcccactgtgcaatagctcatttaattatctcaggcataggagataaaaatgacatattcctactttacaggagctcagagccaaggtttgaactggctgtattagatctgccttcagagcccctactcatcttcctcctttctctctgaacaaacttgcctccgaacaaacttggagttgcttatctatccagcaacaagaccttaaacagaacgctatttttctggacatctataacctctttggtcaagggacaagaattaacaccttctatgtgcaactgtcatcgtgtcgtagcttttttatttttatttttgagacggagttttgctcttgttgcccaggctggaatgcaatggtgagatctcggctcaccgcaacctccacctcccgggttcaagtgattctcctcccttagcctcccgagtagctgggattacaggcatgcaccaccacgtccagctaagtttgtatttttagtggagacgaggtttctccatgttggtcaggctggtctcgaactcccgacctcaggcgatctgcccaccttggcctcccaaagtgctgggattacaggtgtgagccaccacgcccagcctgtgtctcagttttacagaagagaaaactgaggcttgagattaaagtaaggattgaaatctaggcctgcctgaccccaaaactgagctctttctactgggaatagcttcagagtaaccagttgcatgggccctaagtctaggagcccttgagaactcctcccttcccttaacctatgtccattatactggcaagttgttttgattcatccatgaaaatatatcctgaatctattttggggctagagggaaaccatagaatgctttggaagttattgtgatcttttaaaaatgcaaatcaggccgggcacggtggctcatgcccataatcccagcactttcggaggccgaggcgggcggatcatgaagtcaggagatcaagaccatcctggctaacacagtgaaaccccatctctactaaacatgaaaaaaaaaaaaattagccagcgtggtgtactcaggaggcagaagaatcgcttgaacccaggaggcagaggttgcagtgagctgagatcatgccaccgcactccagcctaggcaacaagagcaagactccatctggaaaaaaaaaaaaaaaaagcaaatcagatcatgccacatccctgcctagaggcttggaagatttccttgtttacttggaataaaaccccaaacctggccaggagcagtggctcatgcctgtaatcctagcactttgagaggccaaggtgggtggatcacctgaggtcaggagttcgagaccagcctggccaacatggtgacaccccgtctttactaaaaatacaaaaaattagccaggcatggtggcgggcgcctacagtcccagctactcaggaggctgaggcaggagaatcgcttgaaaccgggaggcagaggctgcagtgagccaagatcatgccattgcactccagcctgggcaacaagagtgaaactccatctcaaacaaacaaacaaaccccaaaccttaccttactagggctctgtgccacctagaccctgcccatctctctactgtgttcccctctcatgccctcattccttttgcttcagcgtcaatggctttctttctgtttctctttttatttattaaaaaaatttttttaattgagatggggtctcactatattaccaaggctggtgttgaaatcctgggctcggccgggcgcggtggctcacgcctgtaatcccagcactttgggaggccgaggcgggcagatcacaaggtcaggagatccagaccaccctggctaacatggtgaaaccccatctctactaaaaatacaaaaaaaaaaaaaaaattagccaggcatggtggcaggcgccttgtagtcccagctactggggaggctgagacaggagaatggcatgaatccaggaggcggagcttgcagtgagccaagatyacgccactgcactccagcctgggtgacagagcgagactccatctcaaaaaaagaaaaaaaagaaaaaaaaagaaatcctgggctcaagcagttctcccgccttgacctcttaaagtgctttctatttctctaacttgccagggagccatatcccctttccctcacctgaccccttgaattttcctgccagtattcacaagggtaaaggccccaatgtcacctacccagccagccttccctggcaatccccactggtcctctttttctaaattaaacwttttagagatggggtcttgctatgttgccgaggctaatcttgaactcctgggctcaagcaatcctcctccttcagcctcccaagtggctgatactacaggctcataccactgtgcccggcctcgccagtcttcttatccctcaccctgtgttctcctgtttccagcagtcatccctatctgacatttttctgcacacactgcatcttccccagggcaaggttagctccattcctgcagaaaccttgcgtgtttactctccactaagtccccaggcttcgcccacrtctggcacatagtaagtgctcaacatatgtctgatgagctaatggcccattaggcctggatcccctctctatgggaaatcatgaacttgcagcaaacagaatcatccaatagacactgggccctactatgcgcctggcaccgtgctagacagcagggcagccacagagacacaggctcagtcctggctgaggaactcagtggcccactgggcagagataatgtgcttgtacagtaaggccaggcaaggcgcatgcgcccaggttctactgaaaggccgtctggggtcaaagggtagctggagataatgccagtgtggctcctggatcatataagaaatcccacgctggggttgatggctcatgcctgtaatcccagcactttgggaggctgaggtgggaggattgcttgaagtcaggagtttgagaccagcctgagcaacatagtgagaccctgtctctacaaaaaataaaaaataagccaggcatggtggtgcacacctgtagtctgaactacttgggaagctgaggcaggaggattgcttaagcctgggagattgtgtgtccggaattggtgggttcttggtctcactgacttcaagaatgaagccacggacccttgcggtgagtgttacagctcttaaggtggcacgtctggagtttgttccttctgatgttcggatgtgttcagagtttcttccttctggtgggttcgtggtctcgctggctcaggcgtgaaactgcagactttcgcggtgagtgttgcggcacgtctggagttgttcgttcctcccggtgggctcgtggtctcgctggcttcaggagtgaagctgcagactttcatggtaagtgttatagctcataaaagcagtggggacccaaagagtgagcagtagcaagatttattgcaaagagcaaaagaacaaggcttccacagtgtggaaggggacccaagcgggttgcgactgctggctcaggcagcctgcttttattctcttatctggccccacccacatcctgctgattggtagagctgagtggcctgttttggcagggtgctgattggtgcgtttacaatccctgagctagatacaaaggttctcctcatccccatcagattagttagatacggagtatccacacaaaggttctccaaggccccaccagagcagctagatacagtgtcgattggtgcactcacaaaccctgagctagacacagggtgctgattggtgtgtttacaaaccttgagctagatagagagtgccgattggtgtttttacaatccctgagctagacataaagattctccacctccccaccagactcaggagcccagctggcttcacccagtggatcccgcaccagggttgcaggtggagctgcctgccagtcacgcgccatgcgctcgcactcctcagcccttgggcggtcgatgggactgggcgccgtggggcagggggcggcgctcgtcggggaggctcgggctgcgcaggtgcccacggaggcgggggaaggctcctgcatggctggctgcaggtcccgagccctgccccatgggaaggcagctaaggcccggcgagaaatcaagcgcagcgccggtgggccggcactgctgggggacccagtacaccctccgcagccgctggcccaggtgctaagtccctcattscccggggccascagggccrgccggctgctcccagtgcgggrcccaccaagcccacgcccaccggcaactccagctggcccgcaagcgccgcamgcatccgcacgcagccccagttcctgctcgcgcctctccctccacacctccctgcaagctgagggagtgggctccagccttggccagcccagaaagggactcccacagtgcagtggtgggctgaagggctcctcaagtgccgccaaagtgggagcccaggcagaggaggccccgagagtgagcgagggctgtgaggactgccagcacgctgttatctctcatttgaggctgcagtgagccatgattgcaccattgcactccagcctgggcaatggagcaagacccggtctcaaaaaaattaaataaataaaaaataaaaataaaaagagagagagagaaagaaatcccctttctgagctgggcctctcaccagggacaccctctgcgtagaacacccctatccaccgcactccaactctcccaggctttttgttcattcttttgattccagtgtccacctccttacctccaggcctttcctgacccctcatgtcccaccttgatggcagtccctttagatcccctgtcctgatgctgaccactgctctgatggccggtttccctgcctatacctccatattccccactccctgcccaccycatcagtctatttgttcccggaaagcagggaccttgactagcacccagtgcagtgctcagtacatagcaggagctcaaggaatatttgttgtctgaatgaacaaatacacagacagagtatttcctgggaaggcagaatttaatctccttcctggctgggtgcagtggctcatgcctgtaatcccagaactttgggaagccaaggcaggtggatcacttgaggtcaagagtttgagaccagcctggccaacatggtgaaaccccgactctactaaaaatacaaacattagccgggcatggtggcgggtgcctataatcccagctactcaggaggctgaggccggagaattgcttgaacctggaggcagaggttgcagttagctgagatggtgccactgcactccagcctgggcaacagagcgagactctgtctcaaaaaaaaaaaaaaaaaaaaaaaagactctcctttctgaggccagcacaaggggttgagaacaagagcccttccacatggtcacagcccgttcttagtgtgtattcactgctggactggccactrcctcattcagggctctactgccaagcctcaaactttttttctgtctctctctctctttttgagacagggacacgttctgtggcctggctgaagtgcagtggcacgatcacagctcactgcagccacmgcttcccaggcttgagagatcctccccatctcagcctcccaaggagctgagactacagtcatgcaccaccttacccagataatttttggtagagacagggttttgccttgttacyggtctggaactcctaggctcaagtcatccacttgcctcggcctcctaaagtgctgggatcccaggtgtgaaccagcccacctggctattttttcctttattattatttttcttaggtccatgaaggttcatattgcaagaagtccacagggtatagagcaaygtggctccctctttctcttccccagagggagctgctgcatggtttccgtgtgctgtcttccactttgctgcatcttcacttcagggaggcctgcagtctgcagccctcttgggacccgagggcaccactccctgttggaacagaagagtcagttctggcatcagcagtatcactctgtagctgggtccaggcagaggggacatgggccaggaggatttattccaggctgtaagatgcccaagtgcagggcagctggagaagcccatgccragagagcaggcagtgcccacagtcctcctttacagggtgtctactggatctcatgtcaaagcaccaagatgccaggtggcttgatgatgcctggggagccaccatggcactcaaggggaaagggtctcactccacggggagacctggagagggacatcccctatccaaccccttctgccaggtctagcccaagccttccccaagagggttgagaaggcggtgacaacctcaactacagcttctctgcccaaacatgaatccaggtttagataaagatgaacaacaggaggccccaaaaaggaaacctgatggggctctggggagagaggctctagggttagggaaggctttcctgggggactagtgtatatacgagcctcaggtcttgtaaggttttggaacgagggttggcagcttcattgttgagtcgctgctaagttgcaagggtggggagtgtcaagatatctcctagtccaattccattttcttttctttttgttttttgagatggagtcttgctctgttacccaggctggagtgcagtggcacgatctcggctcactgccagctctgcctcccgggttcacgccattctcctgcctcagcctcctgagtagctgggacaacaggcacatgccgccacgcccggctaattgttttgtatttttagtacagacggggtttcaccgtgttagccaggatggtcttgatctcctgacctggtgatctgcccacctcgacctcccaaagtgctgggattacaggcgtgagccaccgcgcctggcctccaattctattttctattctccatattttaggaccaggaaggcagatgctggccactcagccactctcatccygctttcctactccagaccttattaggctaccgtgacaccttgtctgctaagcaacacatgtctgcaatgggagaaatcccatttgccacccttccctaaaggagctctgccttacctcaacaggccccacgaagaagcccatgggagtggcctctcctagagttttgcagtgcacaacctgtgcagccctccacaggggccctgcccggctagacagatggcttttggaggctccataaggtaggaagaggggtgggcccagggggttcataacctcccacactgcttcaccctaggcagttctacgctctctgtcttacacagtggacttacattggacttctgaataagacttcacttgagacagcgtgtcccattgctaataacaatgacacaggctgtgacaaccccttcagtagagagagaccagttaaaccacaggcttcacagtcttaatcccagctctgcctcttactgcctgcatgaccttgggtgaataatactatgtacctcacagtgtggctgagaagaccaatagagataatgcagggacagtgtggccagtgtggtgatagtgggaccacaaggaagaggacagtcccttccagctctgccggcagagcctagggagggctctcagcactgttggcgccgatcattctttgttatgsgggctgtcctgtgcatctctggtctctacccactccatgccaaccctgccccctcctcagttatgacaaccaacaatgtttccagatattgccaaatgtcccaggaagacaaagtggcctccagttgagaagcgcgcgtctggagagaaatgctgcaggaagccgagagggtgaggcagtgggagctrgaaggaatggggaaggcagggaagtcagcctccccctgctccggaaactcctgtcagctcctctgctctgtccctggagaccgcttgtctctgctggaggcttcctcctgataaggctgcttcgtgtgtgtgtgtgtgtgtgtgtgtgtgtgtgtgtgtgtgtatgtgtgtgtgtgtgtgtatgtgtgtgtgagagagagagaaagaggagcaggaggtgggggaaggagctggagagggaagggagaaggagagaagaagggggaagggggtagggagagggattgcagaagacagaaggagagagctagaaggctaaaaatacctctggcccccacgtccctagtttctgcacagacccaagatatagccctggggacctggggctatatctggctacatagtctggagtcctttgccccctcctcttagttacctgagggagatgattcaggccagaaggggtgcaaagcgggaagaggaaggcaggaagaggaaggcacccagtctttgctctccctgtcccccacagacaatcccccagcaggtttgccttctgtgcctccaaaatccaccagggtcaggctcctcccactcgccccatcagccgccacctctttgtttctggagttaccacctcactggtctccctgcttccacgttccttcttcctatcatgtgttctccaggaagcagatggaatgacatgaaaaatgtaaattggatcgtgccatccccatgcctaaagccctgtaatggtcccctcagtcctcaaaatccaagccagatgcccggctacagccttcaagtgttcacggtccccaggcccctctttcactcaccaccaaactcccaccacactgtccttccttctattccttgcctgcaccatccccctagctttttaccaactgaggcgttatctgaaattcctctgcctgcttttctcagccccatgtcctaagcattaaggtgtccacaaagattcctttctcagacatgccttccctgcccaccccatctgaaaacgacctcttcaaatactggcccatcatcctgttgttctttacagcacttttgactttatcttcttaattcctggagggcagggacctcacgtgtttcttctgtatctccagggcccatgtgtctggcacacagtgagcagtcaataaaatggattgaatagacaaatgaatgaacaatgagatggtctccagagcccctcccagcgtgctggctttttgtgtcattgcagactttgcacctctggctccagggagctcacaggcaggggctggtccagcccagaggcgatgaagacagtgacgatgatgatggtggtggagatgcaggcgctgactcaggtagctccgtgaagctggaaataagtcatttgaggcaaatgaaaggatgacccaggtcacagtggggagaacaccttgggtgggggacttgctcgcctttctctgtgatgctaataacagacttgtcatggctccaaagcccttttcctcctttcagctgtctctctgtgactgtctttgtgacagtctcattgttgttgttactaagatggcttccctcagaggacggacacttggagtagtggcaggttcggccacccctagagacgatggcggtggggaccggggcagccccctggccccctgggctcaccccctcctgcgccaccccgggccgtgccgtgccaagccagccaccagagggcgcgccaggtcgcggcatcccggctccccgtcggcctggggccggcgggcggggctcggctgtctcctactgaggcctcgcacttcctctctgtcttgccattcctgtctccctctctccctacctggcatctccccctgctatcttcatcccctgccccctccttcgtctccattagcaaacccgcatggtagcctatcttgtggtgagccccagtgtccggcgcggggagggacacagacgcgtcccagtgggatctccgcccactagggagttcacagcctaacctgaatccccgcaccagcccagagcaatgaagcctcctgaaaggactgctgaggagagacaggccgtcctacaagaagtggggcaggacatggtcttccccacggaggtggctccacatccctcccacctaccccagccaggggccctctgactgtgccactcaccgtgcaggcgcaccacacaggacgtcctgtgatggaaaaggcttaggcagagtctggctgccttatctcactaaggggtaaactgaggctccagcagtgaaactagtgtgaagtctgggttcaaattccatctctgctgcttaatagctggacgaccttagacagccttcctaacctctctgagctcaagctgcggaagtggcagcctcttaggattatgggagaacacacatgcaacatgcttagcactgtgcctgcagttagtcattattcttaagaaagtggcctacccatggccaccgattgagcagaggtggcagacctaggcccagaatccccatctgacctctgaactctcaggccctagttctttctgccgttgtgggcagaggctgcagggaacagcagaggatgcaaatgcccgttgagtccttttttttctatttttttttttttttgaggcggagtctccctcttgttgcccaggctggagtgcaatggcacgatcttggctcactgcaacatctgcctcctgggttcaagagattctccttcctcagcctcctgagtagttgggattacaggcgcccaccatcatgcctggctaattttttgtatttttagtagagacggggtttcaccatgttggccaggctggtcttgaactcctgacctcaggtgatccacccgcctcggcctcccaaagtgctggggttacaggcgtgagccaccgcacccggcgagtccttagtttgaggagaggtctgtgttactgtccccagctgtctcatctgtgttctcctgccatgggcatctcttgggatggctccacacttcctcctggcctggccacacctaatccttcaaacctakyccttgggtggggagaggggaaggtggccttagcattgccagggaagtatgaactggcacaatcttcatggaggcttcgtcagtgtctggcaatcctctgacccagttgttctacttcaggggatttaaccctacaagagggtcatatatatacacgtatgaatgtatacatatttgcgtgcatttatacatatatctctgaaggatacataagaaactagtagttttgagttgggtgccatggcttacacctgaaatcccwacagtttggtaagctgaggcaggaggatcacttgagcccagaagttccagaccagccttggcaacatggcaaaactccatctctaaaaaaaaaatacacaaattagcagggtgtggaggcatgtaattgtagtcccagctacytgggaggctggtgtgggaggatcacttgtgtccaggaggtcgaggctgcagtgagtcaagatcgcgacactgcactccagcctgggcaacaaagcgagaccctgtctcaaataaaacaaaaatccccaaagaaactagtggtttcgtttgcctagggtgggggggtagggtggaaggggatgggagtgaggtgaggtgggagattttccccatagctcttttgttattcttggatattaagagaagtgaatgtattacctatttaaaaataataatttaaacgttttttaaataggaatggtagccaaatgcaatgccatacaattaaataacaaaataataagtaaagtcagagttgggggaggagccaggtgggwttccctctccccttctcatttctcacccttcttctttcttcctctttcccctccccctcctctctttcttcaggaagccacctgtcctgttttctccagcccacagtgaggtttctttgaactcaytcattcattcacttatttatttattttttgcgacagggtcttactctatcactcaggctggaatgcagtatatgatcatggattactgcagcctccaccttccaggctcaagtgatcctcccacctcagcctcctgagcagctgggactgcaggtgcacaccaccacacccagctaatttttgtatttttttgtagagatgagatttcaccatgttgcccaagctggtcttgaactcctgggctcaggcgatctgctcgcctccacctcccaaaatgctgggattacaggtgtgagccacctcacccagccattcattcactgattcattcttcatttattctttcaccaaatgtgctcttgggtggaagcagggatttaggcagactctttctgctctctacaggggagatggatattgagacgacacaatcctcagtattgtcattatcattcatcgaagtgccatgaaggagaagtggcatggcagcatagaaaagggacctgaactagcctggagggccagaaaggcttttctgagaaagtgactcctttatttccacttaactcttcaaaaacttttttctcttatgaagaaactcaaatatatacaaacatacaataccccatgtacccacagcccagctccatactgatcaacatggccaatcctaccttattttatcccacctactcccccacttcaccatgtcaaaaagcaaaatgtcaacaaattgagtttcaaaaatttaactggcttggccgggcgtggtggctcacgcccgtaatcccagcactttgggaggacaaggcaggcaaatcacgaggtcaggagatcgagaccattctggctaacacggtgaaaccccgtctctactaaaaatacaaaaaaaagaaaaattagccaggcgtggtgtcaggcgcctgtagtcccagtgactcgggaggctgaggcaggagaatggcatgaacctgggaggtagagcttgcagtgagattgcaccactgcactccagcctggggaacagagcgaaactccatctcaaaaaaaaaaaaaaaattttaactggcttttcttagcgattcatgaattgggcagaatcccatatacaaaacagaaaggtgctccaatggggtaaccagagaagctgggcttttttttttgagatggagtttcactcttgttgcccagactagagtgcaatggcttgatctcagctcactgcaacctctgcctcccaggttcaagcgattctcctgcctcagcctcccaagtagctgagattataggcatgcaccaccgtatccggctagtttttatattattagtagagatggggtttcactgtggtggccaggctggtctcgaactcctgacctcaggtgatctgcccaccttggcttctcaaagtgctgggattacaagcaacacccactgtccctggccagatctttggaatttttaagagaaatcagaaatcagatttttatgtgcaacctatttctgtttaaatgttggcaactaattcttttttttttttttttttaactgtgcagactgagaagcagaacaaaaacaacagcaaagggctgctgatttgtctttctggactagcagatctctaaggagtctttggctcagacatcttgactttcagcacagtctctggggagacaacataaattccactcccaagaggtggacatgggagaaaggagagggcagtggggaagatggaggtatccagcctcccctcattaagcccctccagaggttatttggggaataggggttgctgggaagccaggtcacagggagctcgagaggtgcgggaaggcagctgggcctgcgataaatcagccgccataacctgcccgctttcccagannnnnnnnnnnnnnnnnnnnattcaaaaaaaaaattttaactggcttttttgacgattcatgaattgggcagaatcccatatacaaaacagaaaggtgctccaatggggtaaccagagaagctgggcttttttttttgagatggagtttcactcttgttgcccagactagagtgcaatggcttgatctcagctcactgcaacctctgcctcccaggttcaagcgattctcctgcctcagcctcccaagtagctgagattataggcatgcaccaccgtatccggctagtttttatattattagtagagatggggtttcactgtggtggccaggctggtctcgaactcctgacctcaggtgatctgcccaccttggcttctcaaagtgctgggattacaggcttgagccaccacgccctgccagaagctgggcttcataggcagaaaaatgttgaagaaagcagaaacggggaacaaaaagtggattggttatttcaaagttacattccttgtagggttaaagcagaggggacctccttatcatgctgtctcaggttgactggggcattttagctagctgctgtgaatatcctattttttggaaaactggcctatttctaagttcagtttgattatatggcccctcagaatgagtgactccagtttggtttggcctgatttgttaggacctagtgcagaagttcagtccaaaacaatggcatctcataaattttatttaacgatgctcacctcatttttttttctttgagaaaaggtcttgcaatgttgcccagactggtctcagactcctgggatcaagcaatccttctgccttagccacccaagtagctgggattatgagtgcaaaccactgcatccaactccacccaattattttgaaccaaatctcagatattatatttctttttttttttttttgagatggagttttgctcttgttgctcaggctggagtgcaatggcacaatcttagctcactgtaatctccgccttccgggttcaagcaattctccagcctcagcctctcaagtagctgggattataggcacgcgccaacatgcctggttaattttgtatttttagtagagttggggtttcaccatgttggtcaggctgatctcgaactcctgacctcaggtgatctgcccaccttggcctcccaaagtgctagaattacaggcttgagccaccgcgcccagcctcagacactatatttcatctgtaaatatttcagtataaatttccaaaaaataaggacttttaggccaggcagaggttgcagtgagccgagactgtgccaccacaccccagcctaggcaatagagtgagactccatctcaaaaaaaaaaaaaaatacccacagggttcttgctgtggagcatgcacctgtagtcctgtagtcttagctacttgggaggcagaagcattgcttgaacccaggagttggaggctgcaatgagctataatcctgccattgcactccagcctgggcaatagagtgagactccccatctctaataaaataaagataaaaataaaaataaataatacrttttttttaaaaaagctcactatggagatggagtgaaattccacgaagggcacacaatgagtgatgcatgaacgtgctcagcccatgtctttcctccccagctccccctcatcccctgcatcctattttcttttccttttttrgggggggtggggatggagtttctctcttgtcatccgggctggagtgcagtggcgcaatcttggctcactgcaacctctgcatcccgggttcaagcaattctcctgcctcagtctcccgagtagctgggattacaggcgcccgccaccaagcccgactaattttttgtatttttagtagagacggggtttcgccatattgggcaggctggtctcgaactccttacctcaggtgatccacccgcctcggcctcccaaagtgctgggattacaggtgtaagtcactgcgcacggccgcatcctattttctttactgggaaacacactgctgtggagagggaaagaagccaagtgctcagggcctatccaaggtaggaagcctcaccctgctagcagccttgagctcaggcttcctgctttctgagaaatactgtcccgaggtctccagctccataggtagggatggtctgggggttggaaagaaagggggcgtaacagctaaggttttccattggctttttggggaccagtggtgcctcagatagagaagcccaaaactgaaagtttctcagagaattataaaaaatatatgtggtagtctcgtctcccactgccagtattgtggttttggcagagttatgataagggccgagtcttccatctggcatgggacccaaggcctcccagtcaaagacaagataccattaatgattagattgtcatcttggccaggatttgctctctcagcaggaagcagaggttgcagtgagccgagatcgcaccactgcactttagcctgggtgacagagcaagacttcatctcaaaaaaaaaaaaaaaaaaaaaagcaactgaaatacccccacacattacatatttgcatgttcatacatgttcaaagtcgtgtacacttataaacagacatgcctgcacaagtgtgcacactcctttatcacaggtgctgctggcttcccccttcctgatgaactctgtcagatgcccatttctcctagcaaccttgttttctgaaaggctgactccaaccctgctccaggagagggaccttcattagtctaagccaaccctggtggtcttagtccctctgatggagattggtttacctttgggctatgtgaccacgttctagccaatgacatttggaaagaagttggcttggggcttctgtgaaattttccttattcttaagaaagtcatctcagaagtgaagactcatttacctgtcattggattytgtaatgtgagagtgtggggtatggaaatgctgcagccatttcgtgaccttgaggatgcagaattaagcagagtggagaagtggaaatgacccagggcctctaatgccgttactgatccacacaatcagtcaacttgagagtcctcccttcccatctctggaattctagtcatgagagatattaacttgatttattgttcaaggtctcttttcttttttcttttcttttctttcttttctttttctttccttgtagcctaaggcagcaaaccgataccctccttccataaacacattatctcacatatacatatccatatatctgtatataaacaactagagccatatatagaaagtcacagctgagcacatgtgcacgctgtttacatgtatgtataataaaagcaggccgggcgtggtggctcatgcctgtaatcccaactttgggaagccgaggagggcagatcatgaggtcaggagtttgagaccaacctggccaacatggggaaaccccatctctactaaagatacaaaaaattagcggggcatgatgcgtgcctgtaattccagctacttgggaggctggggcaagagaatcgcttgaacccgggaggcagaggctggagtgagctgagatcatgccactccactccagcctgggcgacagagcaagactctgtctcaaaaaaaacaaaaaagcaaaaaaacccacataatattctacatgtatccgcagtgattcaaacttaatatacacagagaaaagtatacatcctcctaggtacacagatagaaggacacatatacatcatrtttcatacatgcatgcaaatctatgtatagtacaacagacataaatgcacacgggcagtatgcatttctacacagagccacacatactggttacatcgatggcaacattatttttttctacccacgtctaaacagccacaaagtgcatacccacagctctgagggctgcttggctatgagcacccaggactgaagaaagttcaggaaatagttaggagagggacttacagaccagaacaccactgaggagtgaggaggtcaagtccagggtggcttggacatgcacggcagcacctgggtcatggatgctagacacagcaccaaggcaagctgtgattagagtgtttccaccttcaaaggcgaaaaaaaccttactctcacctaccccaggaccttcgtccatacagatgaaaaacctactttgcccttcaaacagctctttttgttttcctcataggcaaataattgagttagacgttgcatgaaagtcaatttttttcccatttatgccactgggcattctaggtagaaggaaaagtgcaaaggcaaagaaatgcaaaatagcacagtgagtttaggggattccagtggaaatgagtttgcagcagaaactgaggatatgacagaagatgaggtagggaaatgggcaagggccacgaacctagatttacctctaaactcccatggcccaatccattcatccgactcccagggtcacrtgactttgctcccaggcctgcatcttccatccatcagctttttcatgccaaacacccaaattaaatggataaccaagacattttaggagacaaggtagcaatagtcagattttctttctggcttttgtatggggttatttaggttttctgctctaaattacccttcttttgtttcttttttataacagagaggagttaccaaggacattcttgctaaattagtttgtatttattattcaacagtgtaaatcatctttcaaaaatgtcatgtttccaagtttaataaaaagtatttccaaaacagtacatatggtatgttcccattttggataaaatgtttgtatgtatatttatatgtgtatataataaggtctggaagtaaatacacaccaactgttaagcaatagttacatatgagagacgggactgtaggtcatctttacctcctttttttttttttttttgagatgaagtctcgcttttgtcccccaggctggagtgcgatggcatgatctcggctcactgcaacctccgcctcccgggttcaagcgcttctcctgcctcagcctccccagtagctgggattacaggcgcctgccaccacgcccagctaatttttgtatttttagtagagacggagtttcaccatgttggccaggctggtctcaaaatcctgacctcaggtgatctgcctgccttggcctctcaaagtgctgggattacaggagtgagctaccgtgcctggccatctttatcttctttagacttttctgcattttttctcaattttatgtaaaaaatttctgaattttatgcatttttctgaattttatgttacttttatcatcagaagaaaatgattttaaattatttttaaagtttaaggctgggctcaatggctcatgcctgtaatctgagcactttgaaaggatgaggcaagaggactgcttgaagccaggagtttaaggccatcatgggcaatataactagatcgtttgtctaaaaaaaaaaattagtcaggtgaggtggtgcatgcctttcatcctagctacttgggaggctgaggtgggaggatcgcttgagcccaggagtttgaggctgttgtgagctaaaatcatgccactgcattccagcctgggtgacagaacaagatgctgtctcttaaaaaaaaagaaaaaagttgaatctacattgcaatggtttgaatgtttgtccccttcaatctcatgttgaagcttactaccccatgtaactatagcaagaggtgataggatcatgaagactctgccctcattaatgaattaatccactaataaattaaaggattaatgggttatcataagagtggattagttatcatgagagtgggagccaggcactgtggcttatgcctataatctcagaactttgggaggccaaagcaggagcattgcttgaggccaggcatgcaagacaaacctggccaacatagggagaccccatttctttttttctttctttcttttctttttttttttttgtagggagtctcactctgttgcccaggctggagtgcagtggtgtgatctcggctcactgcaacctctgcctcccggattcaagcaattctcctgcctcagcctcccaagttggtgggatttcaggtgcctgccactacacccaactaatttttcgtatttttggtagggacggggtttcaccatgttggccaggctggtctcgaactcctgaccttgtgatttgcctgcctcggcctcccagagtactgcgattacagacgtgagccactgcacccagcagggagaccccatttctaaaaaaaaaagaattagtcaagtgtggtggctcacacctgttgtcccagctactccagaggctgaggctgcagtgagccatctttgcatcactgcactctgatgtgggcaacagagcaagaccctttctcagaaataaataaaggtctggtgtggtggctcatgcctataatcccagaaccttgggaggccaaggcaggcaaatcacttgagcccaggagtttgagaccagcctgggcaacatggtgaaatctctctccacaaaaaaataaaaaaacaaaaattagtcgggtgtggtggcccacacctgtattcctagctacttgggggactgaggcaggaggattatttgagcctgggaggttgagggttcagtgaacagtgattgccccatgcactccagcctgggtgacaaagtgagaccctgtctcaaaaaattaaaataaataaataaagccagtttggctctcagtgagctccccttgccatgtgatgctctgtaccgtcttggtattctacagagagtccccaccagcaagaagcctctcaccagttgtgccccctagaccttggacttcccagtctccaaaactgcaataaatcatcgtcttttttttctttttttccttttcttttatttttagagacgggggtctcactatgttgcctaggctggtcttaaactcctggccggaagtgattccccagccttggcctctcaaagtgctgggagtacaggcatgagccactgcgtccagccyttttctatgtctatatatacagtctcaggtattcagctgtagcaacagaaagcaacctaagacatacattttaatcaaaagtataataagaaaatttcaggaagaagtgggaaaaggagacatacaatcaacctgtgcacagtagaatcctcctggtgtcttcaggagacccgacgtgatctgaccaggggagtcttgcagctccattctctgtaccaaggcaagtcaaacaggtaaagcagatcacagaaagggctctgacctcaagaaacatgtgatctakgtggaagcatgagtcacatatgcatgaaaaacacagcaggcaatgaatgacaggtaagstggaaagagaattcacctggttaccaggagatatgggctctgttcctagttctggcacccagtgatgaccttgggagcccagtggcttcacctctgtgaactttaatctccttatctgtcaaagggttttaatgacaataattgagaagctgtgatcatcagatgagataacctatcagtgactgctctctgaactgtggtacaagttacctttcaacctggaayagcacctcaaacatgaaggaatctwtccctatggtggaaattcaggcccaagcagtgggcaagtsgggtagatcatgtggggacaaggccacctttggttggcccttaaaaataccagaacacaggggcagcctgcacagctctaacactgcagaacagaagtcaaggtgggcattcttgcctcagctcgaagacctgcacagcctgctcacctttgtagagcagtgcaccccagggagaaaacacaggagcagccacgtctcagccttctcagaatgtccaatccttttcataatttaaccgcttgctctgcataattacttttctcctgcttatgagcttagagcaatagtagttcmcaataactagagatttaataaggctaaattrcaacgagtgtcctgcagaattacacaccgcattaacaccaaatgagttcattagaaattcattaggaatgatttctgcggctgccacaggaattaatcacggtttgccagyggcaggagagggggcaatgaatgaytgcatgggagcgggacgaccttttgccatctgactttcttctgaagcaatatcttycaagggtcatgggctgctttggtagggagattgcttggacgttgttagacatgcctctcaatcttcttccttcttcccagccactgccctagatcaaacctgtagatgttggagtcggaccctttttctgtcctggggagctgagaagtcatcatgggcacttatgttcttgcctgcccagtatcctttcccccttcttctgtcagtgtacttctgtgtttcttggagagctgctccttgaagatactgctgcatgtgggtctctgtgggactgtcagttaagagcctccacyggcctcacccacccccagagggaatacatgtcctcggctgagcccattgggctttctctcctggtattttttagtagctgatatttatgaagtgcttgctaggtgctggccccctttctaaggatcttcatgtactgagcatccaaccctcccattgccagttaaggaagtgggctttatttttagctctattctgtcaacgaggacaccccagtacagaggttaagtgacttgtccaagtgacagagcctgtaactgtccaagctgggactttgagtcatgagtgcagtactataaggatgaaggattgttgaaggtaatcaatgggttggcagtgccccagggactgtcccttccttcttgcttcctggtgctatgrgctatctggaggcctggtggtggagctttttcatcctttctatgagttactccatacgtttccaaaaattttattttttggtttgtcaccaagagtcagtgtctgctacttagatctgtaagagctttggctgatgcctgagccgaccaacaagtatgtaaaggcccaggtatagacactgcacagttataggccctgccctgcacaggccaaacagaaacataaggcaggcttcctgccttccagctgcttatatctcagatagaaaaacaacaacaacaatttcatcctgtgccttcctatgcaagttcttttttttttttttttttgagatgtagtctccctcttatcgcccaggctgtagtgcaatggtgtgatctcagctcactgtaacctccgcctcctgggttcaagctattctcctgcctcagcttcctgagtagctgggattacaggcgcctgccaccacacaactggctaatttctttttcttttttgagatggagtctctctctgttgcccaggctggagtgcagtgtcacaatctcggctcactgcaacctctggctcctgggttcaagygattctcctgcctcagcctcccaagtagctgggactacaggcacccgccaccatgcccagctaattttttgtatttttactagagacagggttttaccatgttagccaggttggtctccatctcctgacctcatgacctgcccatctcagcctcccaaagtgctgggatttcaggcatgagcttctgygtctggccctacaactggctaatttttatttttattttttggagacggagtctcactctgtcaaccaggttagactgcagtggcacgatctccgctcactgcaagctccgyctcccaggttcacgccattctcctgcctcagcctcctgagtagatgggactacaggcacccaccaccacgcctggctaatttttttgtatttttagtagagacagggtttcaccgtgttagccaggctggtctcgatctcctgaccttgtgagccgcctgcctcagcctcccaaagtgttgggattacaggcgtgagccaccgtgcccggccacaactggctaattttaaaaatatttttggtagagacagggtttcagcatgttggccaggctggttttgaactgctgacctcaagtgatctgcccgcctcggcctcccaaagtgctaggattacaggtgtgagccactacgtccagccctcctatgcaagttctaagtggaaaagagccaggatgggatggattgggagsaggaaagatttcatagaaggcacatgagctgggtagaatctttggggagaggtaactgtcacggacactctttgggcacctatccarcccacagtcccttcttcaagaactgtccacccagagcagttggccctcacggtcgagatggttggtaccacatgacgcttttggtgggatcaagcatctgtacccttttctatgtttagagaactttccactacatggggcccaacgaaaggtgggcccaccttctagtacaaagctgaaaaggccagtactcatgtcccgtttgtcccatcgcccgatggcaatgagggtgcatggacatgaggtgggctcagcctctgcagctcatgatacaaataagcagggacaagagaatccattctggtggtggtggccatattctatgcccagggaaatggtggctgcagggtccgcatgcagtgctacccttgataggggtgcaaattgcccagtccagcctttggcagcagaatccttacaaaatcatttctgtgatgtgattgtggctgtggttctagctgtttgtcctgtcctgtctctgtctgttttccaagcctgaaaagtctgtgatccagtcgatatccttttgataaatttcttttttgctcaaatcagtttccattgcttgcaattaagagcgctgctatgaagagctctgcctccctgcacagagctgattggaccagagatgcccacttgactcaggataggccaatcagattatttctcttctgactcaggttctgagagctgtgttgtctgcgtgcacatgggtgagccggaaaggagacctgcagagaatgaaacagacacataaaggaaaggtatggggtagaagaagggagggaagggttcctgacgtttttcagattctggttctagtkcctcatgaacctagactttgtgtcctatccctgggctccttgagatccttctgcattgttagaatattaggttgcaccatctgaaattgttgtttttataggtcaaaaaggtcaaatatcagcagttatacatgctgatggttcaactttataaatcaccttttttattttttaacctaagctagctcaagtaggttttgcctgcctttctctttctttctttctttctttctttctttctttctttctttctttctttctttctttcattcattctttccttcttctctcttataatttttattacagggtctcattctgtcacccaggctgaagtgcagtgatgtaatcataactcatagcagccttgaactcctaggctcaagtgatcctccagcctcagcctccctattagctgggattacaggcacgtgccaccatgcctggttaattttttaaattttttgtagagacacagtcttgctatgttgctcaggctggtcttgcactcttggcctcaagcagtcctctcacctcagcctcccaaagtgctgggattacagatgtatgtcaccacacctggcctcaagtggatttcgttttctttttaattttgtagagacggggtctccctgtgttgcccatgctggtctcgaacttctggactcaagtgatcctcctgtctcagccacccaatgtggctggcatgagccaccatgcctggcctcaagtggatttcttgacttgtgactcaaaggaccttgtctacaacagtcagaaatttcatcaactggccaggtgcagtgtcttatgtctgtaatcccaactctttgggaggctgaggcaggaggatcacttgagcccaggagttcacgaccagcatgggcaacatagggagaccctgtctctataaaaagaaagaaagtaaagaaagaaatcccatcaactcaactcaaaagtgggttgtggaacaggcagagacacaaaacagaagcagaaaataaaggttttccctgtctggcagatactgttcctagtgaggtggctgccctgcagaacttcccagcttgtccctggtcaccatctcagaggtcactatcctccactagtttatgacccatggccatccagtggaacttcagctgtattccagttgcctcaaataacactgttcatgttaacacatagttttgaataatgctattgtttttgttttccccatgttgtggtgtttcctattgatgtatacaattttattttcctaacctcactgtccaacaaaaggagaatggctgagtaagttgtgatatgtctgtacaatggattacaatatggccattaaaagtgatggtgggctaggcgcagtggctcacacctgtaatcccggcactttgggaggacaaggtgggcggatcacctgaggtcaggagttcgagaccagcctgaccaacatggtgaaaccccgtctttactaaaaatacaaaattagccgggtgtgttggcaggtgcctgtaatcccagctactagggaggctgaggcaggagaatcacttgaacccttgaggcagaggttgcagtgagccgagatcatgccactgcactccagcctgggtaaaaagagtgaaactctgtctcagagaaaaaaaaraaaaaggtgacggtggccaggcatggtggctcacacttgtaatcccaaaactttgggagactgaggcagaaggattgcctgagcccaggaggttgaggtggcagtgagccatgattttgccactgtactccagtttgggtgacagagcaagaccttgtcaaaaaaaaaaaaagaaaaaaagaagtaaaggcatgaggaattagaactggggaagtggaggtggtgggaattttgtaagagacttgataagaaggtaaaggttatttcaaaccagctgctgttgtgaggaatggggtgggattcatccaacaaggagaggaaagaaccagtgagtatcccaaagccctgctgagggagggtcatgaacttgaggtggtgttaccctcctccccagttgcgccacttcttctggctgcaggtgtaagtcctgcagatgggaggtagaaggacaaatgctttcttgtgtgtaaggatggggcctgggaagccaatgtggcggaaggacattgagggtcctggcagagtagggatrcatccatgggctggataggaaagcagatgaggctgagtaggggatgaactggggaaaattgatgagctgcgaagctggaagcttcattcaatggggtgagacaattttgtcttctgctgtgtatctccatcccctaacacatagccttgtgctagtaagwacttattgagtgaatgaaatgatgaatatatgacttacagttctcattgtaattttttttttttttttgagaccaagtctcactctgtcacccaggctggagtgcagtgacacaatctcagctcactgcaacctttgcctcctgggctcaagtaattctcctgcctcagcctcctgagtagctgggattacaggcacgtgccaccatgcctggctaatttttgtatttttagtagagatggggtttcaccatgttggccaggttggtctcgaactcctgacctcggatgatccacccacctcagcctcccaaaatgctgggattacaggcatgagccaccgtgcctgcctggccctcattgtaacttaacagactggcattccactgctggatcagacagccagcaggatgcatggtggtagcaagcaccacttagttcagaaaaaactgaattcctatccaaacttaatcaatgactggttgtgtaaccttggacaagtcacctaacctttctgaacttagactttcttttctgtaagtagggattattacagccctctcagaagtttgttgcatggattaacagagatgccatgtgttgagtgcttagcatggttgtctggtgctttggggtcattcactaagtaccaaaggagcaatcagtctccaagaccctgattggttctgaaggctacatgtaatcaaattgttccttttagttagtggacaagagtgcaggacctgtagccagacatcctcctccgcttaccacctggacatgttatttctgagcctctgtttcctcatctacaygatgggggtaatatcaggactgacatacaagactggttgggaggataggatgataatttatgtaaagcatttagcacaggacttggcgcattgcaggtccatgttagatcttggctctcagtattttccatcaactgagatgctccatgcgggcagcaagttttgttgagggcagaacaggacttttggatgtcagttagaaatggcataaggcatagagtggagctgttaggcaggcagttggatatactaagttcagagtagagatctgagatggaggaaaaaaattagagtcatcagcaaaagatgatatttaaagctattggctggatgaaatcaccaagggaatgagggctcagagaaaagacaagaagaagggctgaatgctagtacatctgacacttggagatgagggaaatgattaacactgcaaagctgggaattggacagagcatcgtggaagctgcacggccagcctgccccaacagttacttaacacactcacttaacacactcttatatactctgtgccaggtgctgcgaaaagtactttacaaaaatgaactcatttatttattttattttatcttatttatttatttattttattattattattatttttggacagaatctctctctgttgcccaagctgcagtgcagcggcatgatcatggctcactgtagccttccactcctacgctcaagtgatcttcccacctcagtctcctgactagctgggactacagacacatgccaccatgcccagttgatttactttattttattttttgtagagatggggtctccctatgttgcccaggctcatctcaaactcctgggctcaagcaaatctcccacctcaggctcccaaagaggagggattacaggcatgagcctctgtgcctggcctatttatttattttagagtcaagtcttgctctgtcacccaggaggtagtgcagtggcacaaacatagctcactgcagccttgaactcctgggctcaaacgatccttcttttagcccctcgagtagcagggggactacggacacaggccaccatgcctagcttaggttttctgtttgttttttttagggacaagttcttgctgtgctgcccaggctggtctccaattcctggcctctggcctcctgagtcactgagactacaggtgacagccaccacccctggctgaactcacttaacattagtaacatccccttcagataggcaccattattatccagattttgcagatgagaaaactgagacacaaaaaaataaataaggtgcccaaggccacagaaccagtaagtgacagagctgggattcaaacctaggcagcctgtgcctagagtctctgtctctttcgtgtctcattgtggataaacaaagcgccaactggattttcttatcttagtctttgacttttttttttttttttttttgagatggagtctcactctgtctcctaggctggagtgcaaaggcgcgatctcagctcactgcaacctctgcctcccgagtacaagcagttctcctgcctcagcctcctgagtagctgggattacaggcacccgccaccatgcctggctaatttttgtatttttagtagagacggggtttcgccatgttggttagggtggtctagaactcttgacttcaggtgatcctcccacctcagcctcccaaagtgttgggattacgggcgtgagccactgcgcctggccttttttttttttttatgagttggggtctcattctgtcacccaggctggattgtagtggcacaatcatagctcactgtagcctcaaactcctggactcaagtgatcctcccacctcagcctcctcagtagctaggactacaggcgcaagccaccatgcctagctaattgttttttaatttttttagagccagggtcttactatgtaggccacactgatctcaaactcctggtctttgattcttgagagtaaaactagaagtatcatcatgggaaaatattgttctcagaggytccagttagctctgacattctagggatcgatgccarctagtatttcagattttagtggaggaaagaggaaggggagtttaatcaaggaattgataactctgatagttcacttactctatgcaagacctgtaaggtcctggggatggagagaataggagggtgcccagggctcctcctcacccatggactcaagaacctgtattcccacccccttctccaggcattactctgagaataatggtagctggctgaggcaggggccagagttcaggtggaaagctggggtggcccaggggaattagccttgggctcttctttatctctattggggtatagttgttctattggttctattgcctcataaaacttcactgtgatatggaggcagtttgagttcattcacccctccrgggaggttctcaatgagggtctgaacaaataggtaaacycaggagaagrggggaagaggcgggcatgggtggatggaaggtggagggtcagatgtacacttagactctagggaaggggtgggagcatggctgagtcagtcagctgagtgccaatgtcatcctttcccatagccccaccactcccatcctgccttggacactgaccttggaagagtagcaattaaggaaaaaacagctctgaccgtgcagaaggaaatcaatgggaaagggagttaagcgggggcctggagaagccacttggtccttcttgcccacatcccctggcctagagcttctcaaggctgctgagcagtacaatcactggggagtttgtcaaaatgcagattctagggccccaccccagacctaccaaaccagaattttgggggstcaggtcacagggatttctatttttcacaagccctcccttcctacatccccagtagcgtatgaacacagccttacagcctattccacatagatctgaacaaataaagtgaaatcaacactatcccagtacccaccaggaatacatacagaaggaaaaatgaaatgcagcttgaggcctggaagggatcacaatgtagttgggagataaaagactcactttgtgaagggttaaattaatgctgcaatatataaacagtagttcaaaataggcagctaggctggacgaattgccagtgagtgagaataacagtagatatccttcaacaatcacctgtgaaatgctagatccygtactaagcacttttgctatgtactttcatttaatctcattaaaactctggaagatcggtatttttttccccatataataatgaatgaggccaggtgatggctcacacctgtaatcccaggactttgggaggccaaggcagaaggatcgcttgagtccaggagtttgtgacaagcctgggtaacaagtgaggcctcgtctctactaaaagttaaaaaattagccgtgcgtggtggagcatgcctgaggtccctgccacttgggaggctgaggcaggaagatctcttgagcctgtgaggctgaggctgattgtgccactgcactccaccctgggtgacagagtgagaccctgcctaataataataattattattattaataataaataaggctttgccttatttgttaattcttctcatattagccttccctcatactcaggaagtggtcgggtaatgtttctgtgttccaaaaatatccttatgttacagtctttatttctttgatcacatcatgttgtaactgcctgtttatgggactgtgtctcctacaagatttgaggacagaccgggcgccgtggctcacgcctgtaatcccagcagtttgggaggctgaggtgggtggatcatttgagatcaggagttcaagaccagcctggccaacatggtgaaaccccgtctctactaaaaatacaaaaattagccgggcgtggtctatgggggcctgtaatcccagctacttgggaggctaaggcaggagagttgcttgaaccctggaggcggaggttgcagtgagccgagattgtaccactgcattccagcctgggtgacagagtgagactttctctcaaaaaaaaaaaaaaaaaaaagacttgagacttgaggacaggtacttggtatttccagaacccagtgaactagagatgctcaggtgatgtttgttgaatgaatcaatggtgtgtctgaagtctcagagctaagacatgagaaggctgagtgactctaaagcccaggttcccccactgagtcattacaaagagaargtacaggctctggggatttttgcaagggacaatctctacaggttggactaatcaaaaaagcctgattggaggaggcgggggtgaaggacaattagaattcagaaagactgatgaaaggtgagcagtcattccaggcaggccaaggcaggaaggaggggttttacaaggtacgaacttcctccaagacgagagaccccagaagactccaggagactgtgcctcaccccctaaacctttctagctcactcactggctgtcaccttctggctgacttgcatctccattaccgtggtaaaattatttcccccaaggttttcagggagatggtgaatttttcattgtttctcatgcctagagcatggcgacaaaacatactctattagtggatttgtccatttggcaagtccctttgaataatggatggagtttttttttcagtttccatgaagaaataagactcatttatgtccatgatgtatatctatgtatatagctatgtgaaaaagagcaagacaaaacagtgtctccgaatttcattttggttaaaaccagtaggaaaaaaggatatgcacaaatatgtttgtgtccatgtggaaaacatctagaagtttatctactgaatttaacagcaactggctctggaaaatgagatgtagtgggatctgcggttttaacctttacaaagtcttaagcttttgtctttttaaacaatgagtatgcattaattttacaattgaaaaataagattgtttggaaggattataggtagcttcaaatttatttgtgttttgttctttccaaattttttcttttctttttttttttttttttagacagggtctttctctgtcacccaggctgaatgcagtattgcaatcatagctcactgaagcctcagtctcccaggtgtaagtgatcctcttgcctctgcctccaaagtagctggtaccataggcacatgccactacacctgctaatttttaaatttttagtagagatgaggtctctatattgccccggctggtctcttcctacattttcttttcttcttcttctctttcttttcttttgagatggagtcttgctctgttgcccaggctggagtgcagtggtaccatctcagctcactgcaacctccgcctcccaggttcaagtgattcacctgcctcagcctcccaagcagctgggactacaggtgcccaccaccacacccggctaatttttgtatttttactagagatggggttccgccatgttggccaggctggtctcaaactcttgacctcaggtgatccacccacctcagcctcccaaagtgttgggattacaggcatgagccaccatgcccggccacagattttctactatgaagatatgttacttttataatcagaaaataaaccccctttttattataaaagttgttaaaaagaaaagaaaaattctcaagatggcccaatttgttatgttgaggggcaggaaagtaccaaagatgtttgaaactctgagtcccagttaagctgggtgtaaagtaattcaatcccaatttgacaaaacattgtatgagttgtaagaatgttctagaccccttaagtttgtagtcccatcctggggctttagctcaaggaaatataggcataccttgttttattgcacttcacttgactgtagttcatagataccgtattttatttttattttttaggttttttagagatgggatctggctctgttgcccaggatggagtgcagtggcatgatcatagcttacttcagtcttgaactctaggctcaggtgaccttccagcctcagtgtccctgagaaactgtgtttttcacacatcaaatgtttgtggcaaccccatgtggaacaaatctgtcagcaccatttttcactttgtctctgggccacattttggtaattctcacagtattcaagctttgttattatttttatatgtgttctggtgatcagcaatctttgatgttaccattgtaattgttttggggtaccataaattccactcatataagagtgaatttttgcccgcccttccttccttccttccttccttccttctttccctccctccctccctccctctctccttccttccttccttccttccttctttcctttcttacttcttcctttttttttgacaaattctcgctctgttgcctaggctggagtgcagtggcacaatcttgactcatgcagcctctgcctcctgggctcaagcgatccttccgtctcagcctctcaagtagctgggactacaggcacacgccaccacacttggctaatttaaacatttttttatagagatgattttttgtctcactatattgccaggctggtctggaactcctgggcccaagcgatctttccgcctcggcctcctatagtgctgggattacaggcgtgagctgctgtgccctgccaaaatagtgaacttccatccattccccatctctctttccctcctcaggccttcttattccctgagacacaatatcgaaattaggccaattaggctgggcacgatgctttatgcctgtaatcccagcactttgggaggccaaggtgggaggatcgcatgagcccaggagtttgagaccagcctaggcaacaaagtgagatcccatctctacaaaaaaaaaaaaaaaattggccgggcgcagtggctcgcgcctgtaatcccagcactttgggaggccgaggcgggcagatcacgaggtcagaagatcgagaccatcctggctaacacggtgaaaccctgtctctattaaaaatacaaaaaattagctgggcgtggtggtgggcgcctgtagtcccagctactcaggaggctgaggcaggagaatggcgtgaacccaggaggtgaagcttgcagtgaactgagatagcgccactgcactccggcctgggcgaaagggcgagactccatctcaaaaataaataaataaataaaaattaaaaaataaaaaaattagctgggcatgatggtgaatgcctgtgatcctagctannnnnnnnnnnnnnnnnnnnnnnnnnnnnnnnnnnnnnnnnnnnnnnnnnnnnnnnnnnnnnnnnnnnnnnnnnnnnnnnnnnnnnnnnnnnnnnnnnngctgcagtgaggcgtttttgtgccactgcactccagcctgggtgacagagggagaccctgtctcaacaacaaaagaaattaggccaattaataagctgaaaatgtcttctaggtgttcaagtgaaaggaggagtagcacatctttcagtttaaatcaaacattagaaatgattaagcttaatgggggaataatgagatagaccaaaagctgggtctcttgagtcaaatagttagctgagtggtgaatgcaaaggaaaagtttttggaggaaattaaaatgccactcaaggctgggtgcggtggctcacacctataatcccaggactatgaaaggctaaggtgggaggatcacttgagcccaggagtttgagaccagcctgggcaacataatgagactgtctctacaataattttttcctttttttttctttttttttttgagacagagtcttactctgtcccccaggctggcgtgnnnnnnnnnnnnnnnnnnnntcttactctgtcccccaggctggcgtgcagtggcatgatctcggctcactgcaggcttagcctcccaggctcaagtgattctcgtggctcagcctcccaagtagctggaaatacaggcacgtgccgtcatgcctagctaattttctgtgttgttagtagagacagggtttttgacatgttggccaggctggtctcgaactcctggcctcaagtgatccgccagccttggctttgcaaagtgctgggattacaggtatgaactaccatgtctggtcaaacctgatagcagtttttttttttgttttttttgagatgaagtctcacactattgcccgggctagagtgtggcggtgtgatgtcggctcactgcaacatccaccacctgggttcaggcaattatcctgcctcagcctcccaagcagctgggactacaggtgcccaccaccacacctggctaatttttgtatttttactagagatggggttctgccatgttggccaggctggtctcgaactcctagccttgtgatcctcccaccttggcctcccaaagtactgggattacaggcatgagtcactgggcccagccccaccttttttttttttttttttttgaggcagagtctcgctctgtcccccaggctggagtgcagtggtgtgatctcggctcactgcaacttttgcctcctgggttcaagcgattctcctgcctcagcctcccaagtagctgggattacaggcacctgctaccatgtccagctaatttttttgtatttttagtagagatgggtttcaccgtttagccaggatggtctcgatctcctgattttgtgatccacctgcctcagcctcccaaagtgctgggattacaggtatgagccactgcacctggcccaacctgacagcttttcagaaacatgggaccgtgtttacaaactaatgctgggtgaagaaaaatagaatacaatattgtatttatgtggcgtgtggttattgtatatctgttacagttgataagaaagaaaacaataatgagggagaaggagagaaatagcaaaagagggaggaagagagtagaaaatataaggcygggcagggtggctcacacctgtaatacccgcattttgggaggccgaggcgagtggatcacttgaggtcaggagttcgaaaccagcctggccaacatggcaaactcctgtctctattaaaaacagaaaaattagccgggcgtggtggtaggcgcctataatcccagctacttgggaggctgaggcaggagaatggcttgaacctgggaggcagagggtgcagtgagtcgagatgtgacactgcactccagcctgggcgatagagtgaaactgtctcaaataaataaataaattaattaataaaagcagtttgcttgtattagggttatgggattatagggattttttgaaaaaaagacgttgaaagctattttaagagtaaatataggccgagcgcggtggctcacgcctgtagttccagcactttgggaggccgaggcgggcagatcacgaggtcaggagttcgagaccagcctggccaacatggaaaaccccgtctctactaaagatacagaaaattagccgggcatgatggtgggcacctgtaatcccagctactcaggaggctgaggcaggagaattgcttgaacctgggaggcggaggttgcagtgagccgagatcgccccatgagactgtctcaaaaaaaaaaaaaaaagtaaatataaactatacactggggctctgtgactttggcaaggtatactttgtcaaggtaacacttcactgaacctctgtttgctcctaggtgaaatgggggcaataacagtayatacttcatagagctgttctgaagattaaataagatcattcatgtaaaacactcagctgagtgccaaatgcataataaagatccaataaatgtgagctattcttgccattgttattattatcagtcattgttgtatcatcattattattatcagtgaggggaaattctcacatgctctaggcgggagtgtaaactgctatagcttttctgaaaggcagtaaagtaatagatatacaaattttaaatactacaatcctttgttccaggaatttcatgtctgggaattcatccttagcaagcaatcttagcaaataatctgacatgtacagtgaaaggtgtgaacaagaatatttttatcactgttatttataataggaaaagattggaaacaacctaaaaatccagcaatagctaagtaagttatgagacatacatatgacagaatactctggagctgttgaacaggatatgatatacccttttgtaatgatatagacatgtgcccatatcattacataaacaggaggtaacagagcaatatagtctcatttataccagaaaataaatatgtgcatttaaaagcctaaaagggctgggtgtggtggctcaggcctctaatctcagcactttgggaggccgaggtgggcggatcatccaagttcaggagtttgagaccagcctggccaacacagtgaaaccttgtctctactaaaaattagctgagtgtggtggcaagcacctgtagtcccagctactagggaggctgaggcaggagaatcgcttaaacctgggagcggaggttgccgtgagccaagattgtaccactgcactttggcctcggcaacggagggagacttcacttcaaaaaaaaaaaaaaaaaaaaaggcatggtggcatgtacttgtagtcccagctgtttgggaggctgatttgggaggatcactggagcctgggaggttaaggctgcagtgagctgagatcacacacggcactccagcctgggcgacaaagagagaccctgtctcaggaaaaaagaaaaggaaagaaaaagcctagaaggagaggtaccaaactactatcacaggccacctctgacaggactctcacttgctctgaattatttgaaatttttatatatataacttaaaaaaatccatgaygtgtgtgtgtgtgtgtgtgtgtgtgtgtgtgtstgtgtgtgtstgtctgtctgtctgtctgcctgttagactaaagtaagagtcctggctggagttagaaattccaagattggagattaaagcctggtaaaatgtggcagagttggtttttcatcagttcagagaccgcttagtcccaggtctgggagtcagcaactgtattgaattcagctttagatggaaatgaaggagattcatggagagcaagcctgggaaaaggaaatagacgtgcagaggtttcctgaattaataataataatyggccgggtgtggtggctcacgtctgtaatcccagcactttgggaggctgaggcaggcggatcacttgaggttgggagtttgagaccagcctaagcaacgtggagaaaccccgtctctactaaaaatacaaaattagctgggtgtggtggtgcatgcctgtaatcccagctactctggaggctgaggcaggagaattgcttgaacccgggaggcggaggttgcagtgagccgagatcacacctttgcactccagcctgggaaacaagagtgaaactccatctcaaaaataaataaatacataataatcacgagagcctttgcagagtgttttatactttgcactgtcaattttgcccaatgcagaggacattctcacaagatgggtaggccggagtgatcacggaggagatagagtccctgcatgtgaagtggtactgagagacacagcaggaaatggaagtcaagattctgaacccctaaccccttccagctctgaagcttgaacaaaataaaactcatccagcatccagcccagtgcctggtgcacaggcatcttcaaggcacctggcaccttctcctccaggtgcgctgcctaggcccatgggtggctgctttactctggttgcattatctgcacccttaggagcatctgttctccttcaagtttgctttgctccagctaaactcattgtttcctttcatcatggccctttccatcttcgtcacactgttccctcgtcctagaatatcgtctccctttgttctcagcctcctccaaccttcctgcttctctacacatccaagtcctattggtcctccaagacgggtgccaaatgccacctcctccccaaacatgcactagccctgcgctggacaccattgctccttccccatgctccaggtcagccatctgcttttctcctggggcacatcacatcctgcttacacaagaactctctgcaggtgtgtgcttgtctctggactaaaccaaaggctcttttgggaaaggtgtgtgtctcgttcatctgtgtttcttcagtgctggccctgcatgcagcaagtgctcaagtgctttggttgcagagttagagggtgcaagagtgatgagagatggtgagagcatgggttgagggcagggcatgcgggaacggagggagagatgggcagagaggtgatgactcctcaaacccgttgccatcctgaccctgctggcaatggggtgacagcacttccccagggtgaataacctcggggctctgtccctccaggtcctgcccacatcataaaacagcaagtgcttcctcttyaggacaggagggagaagaagtggggtgacttaggggctgagcctcagcaactgggagagtttataagctgggatagcagacccctcagcaccacccattctcctcatccctctgctmtctggcctccagcctcccagcagcatggctttcaccggcaagttcgagatggagagtgagaagaattatgatgagttcatgaagctccttggtgagtgagctcctgggtatcccttcctcggggttggtttgtcacagccagctctgggccaggaaccctaaagtagaatgggacaggatttcatccattcattcactcactcactcattcattcattcacacatttgttgagcaactgctttctcccaggctctgaggataataagaactaagacactctttaacttttttattttattttatcttattttattttattttattttattttattttatttttgagacagagtctcactctgtctcccaggctggagtgcagtggcaccatctcggctcactgcaaccttcggctcccacgttcaagtaattctcctgcctcagcctcccgagtagctgggattacaggtgtgcaccaccacgcccggctaatttttttttttttgtatttttttagtaaagatggggttttaccatgttggccaggctggtcttgaactcctgacctcaggtgatccacccagctcgacctcccaaagtgctggaattacaggcgtgagctgccgcacccagcatagacactctttgactttaaaacacacatagaatatattagtatttccactttactgatggaaaacttgaggcccagggaattaactagtccaaagtcacacagctagtaattggtaaagtggagacttggttggtgaagtagagatttgatgtttatttagtcaaacatgtatttatttttattcatttatttttgagacggagtcttgctctatctcccaggctgaagtgtagtggcatgatctcagctcactgcaacctccgtctcctgggttccagcaattctcctacctcagcctctcgagtagctggaactacaggcatgtgccaccacatctggctaattttttgtattttcagtagagacggggtatcaccctgttgctcaggctggtcttgaactcctaacctcaggtgatccacccacctcggcctcccaaaatgctgggattacagacgtgagccaccgagcccagcccatcaaacatttattgaacaccagctatatgcaaggctatctcagtgttaccaatggggactcagcgtgacttgcccaagtcagtggcagaggccattggcacccaggaccctgtgatgagtggtgtcaccacgtcctgcctaggagaggaaaccaaagkgttagcatggagaccaggtttgacaagtcacttcttcacacagtcattcagcaaacacaggcctcttactgtgccaaacactgtgggcagagagaccagtgatttcattccttctctcactgcttgacttgtaacaccagtctgttgtgaggaaccaatgagacagtggatctgacaatcttgtggaaatctcagtatctcactatctaaaaagtctcaggcagtgtaactctcaaggttcagaggacagctcaaggggacccgtgccctccctcttggtggccacttcttgcctgccagctggctcagagcaaccctgagaccagggcccttgtgccttggggccttgaggagtcgagagtccctctgagtcatgtattggcagtggccctgaaggagcaatgacttggcttcacctataacagcctcgtgttgtgggatgggaagtgagcccactttggttctagacctgattcggtcattaaatttcagtgaaatactgggaagtccctttcccattctgggtgctcacttccttatctgtaaaataaaagtattagaagacacagtctttttctggcagggaggaggggacggagtcctgctctgtagcccaggcggaactgcagtggygcgatcctagctcactgcaacctctgcctccagggtttaagtgattcttttgcctcagcctctcaagtagccagtattacaggcacctgccaccatgcccagataatttttttgtatttttagtagagacagggttttaccatgttagccaggctggtctcgaacttctgaccttaaacgatctgcctgcctcgggccctcaaggagctgggattacaggcatgaaccaccatacctggtcttgaaagtctcattcattccagaacttcrcgagcttggcaagattcagttatatttatattactatcagaagcttggttattattgatgagcacccaccatgtgccaggagcttcacaaacacactcacattgaatataattcttgtaacagccttttgggatgggccttattatctccatattgtggatgaatagactgaagctcagagagatagggactttccccagccacatggctcacagcacgtattagctgtctcaggcactgtgctcttaacctgcaggctagcctatcatgcacaagggggtagggcggtgggggtgggcaggaaagctcttttcccaaaccacagggttaaaagcagctcttatatggctactctgcttgtccccgggtccagggatctccagcgatgtaatcgaaaaggcccgcaacttcaagatcgtcacggaggtgcagcaggatgggcaggacttcacttggtcccagcactactccgggggccacaccatgaccaacaagttcactgttggcaaggaaagcaacatacagacaatggggggcaagatgttcaaggtgagaggccactggctgtccccctccttccccaggcctccatctgacttctccttctcaaacatggcctccccgctcccgagctgaggcttctttctccagtttggcctccagcattaggagcttgagttacttggcaatttaatgctcctgatttttaatggtcaaacatgggcactaaaacaataagaaaaatagctaatacttgctggacacttattataagctagacacttgctgaatagtttttccatcttaatgcagttaatcctatgaaattgctacaattactctctccagattgatcggggaggctaaatcatgagattaaaaagcttgctggccaggcacagtggctcatgcctgtaatcccagcactttgggaggccgaggtgggtggatggctcgaggccaggattttgagattagcctggccaacatggtgaaaccccatctctgccaaaaatacaaaaattagctggacatagtggtgcatgcctgtaatcctggctactcaggaggctgaggcaggggaatcgcttgaatccagtaggcagaggttgcagtgagctgagatcatgccactgcactccagcctgggcgacagagtgagagtccatcacacaaaaaaataaataaataaaaataaaaaaaaccttgccttagttacacaacaggggcaggcctttacaccaggcactagagagcataagtgttttttttttttattcgagactcactctgtcacccaggctggagtgcagtgtcatgatctcggctcactgcaacctctgcctcctgggttcaagcgattctcctgcctcagcctcctgagtagctgggattacaggcgtgcaccaccacatctggctaatttttgtatttttagctgagatagggtttcatcatgttgaccaggctggtctcaaactcctgaccttgtgatccgcccaccttgacctcctaaagtgctgggattacaggtgtgagccaccgtgcccagccataagtgctttttttatgctgcctctctgtgtagcacagagataaagacactgggccctggagtgagccttggctgggtttgaaaccatgatttcccaccagcaattgtagggccttgggcaagtcatttcactcccctgagcctcatatctctagtatgcaaaaggagactacatacaatctctagctccaagagctgtggtgaagattaaacaagacagtgcatgaaagcacctggcatgttgcctgccacataatgaatgctagaagaaaaaatgcagtcatttgcttttgttttagaagtgaagaaactggccgggcacggtggctcacgcctgtaatcccagcgctttgggaagccaaggcaggcagatcacgaggttaggagttcaggaccagactggccaatatggtgaaaccctgtctctacaaaaaatacaaaaattagccaggcgtggtggccggtgcctgtaatcccagctactcgggaggctgaggcaggagatcgcttgaaccctggaggcggaggttacagtgagccgagatcacaccattgcactccagcctgggcaacagggcgaggctccgtctcaaaaaaagaaaaaaaaaaaagaagtgaagaaaccgaggctcagggagaccaagtaatgtgtctagggccttgcagctagaacatggtgggaccagggatttgaaccccagctatttgcctctatcattaggcctctggtgacccatgtggagttctaataatagaaaaggagtcaggttggcggcagcagggtaaagcaaaaaaggagagcagataagctrtaagtctgcctttcttcatggtccagaacacatagccctcctgtgcaaataactcrcaatcttcctgtgcccagctatcatcacctccactgatagaaaaatgtaagttatctcaccataacctttgctttgtcagtactgcacaaaamccgcttcagcacacagcataagcaacagtctataaactctccagcaagactttgtctccttgcagtcagctcctctcttgctgtcctgcccagtgcacccttgcaacatattttcatactttctctaagaaatctgactttttttttttttttttttttacctacaactgtcttggtaaattcatttttttttttttttttgagacagagtcttgctctgttgcccaggctggagcgcagtgccacgatctctgctcactgcagcctctgcctcccgggttcaagtgattctcacgcctcagcctcccaagtagctgggattacaggcatgagccaccacaccgggctactttttgtatttttagtagagacggggtttcaccacgttggccaggctggtctcgaactcctgacctcaagtgatccgcctgcctcagtctcccaaagtgctgggattataggcataagccactgtgcctggccttggtaaattcttcttactgcccgcgccaccagccccagatagttgccaatcacctgcaacaacccaggcttaatgttgtgcttccattccaggccactgtgcagatggagggcgggaagctggtggtgaatttccccaactatcaccagacctcagagatcgtgggtgacaagctggtggaggtgagtgtcatgctgattcctgggatgattattggatatttgtctgcctcttggccacagcccctcagaagtaggcctctacgcagctggctttaccagcacttcccttgtaccaggctctatgctgagtgctggatgcacatgatgtcatttggtcttcaaaataaccctgttaggtggggatttttatctccatttgaggagactgaggcacagggataagtgagggagcacacagatttgacgacagagctgaggtttgatgctaagtagcctgactgcagcactcacactcaaccgcttctgggacacsagactggaagcccggaagatccttcccagaatataaataaaggaggyggtccaggtgggctcctcaaaggacagccaccactccattccttttccatgagggacatcaggccccttctaccagatcttctgatttatcaagagaagttggaaatttgcacttccgtgtgaaatctccacactattaaatattggcaactaattaaaaaaattctgtaaatattggcaggtcccacacacacatctggggacccactcctcctacactggaggtggtgccctgggaggcccttcctctcacttctgttgctttcccgtgggtctccaagttttccccaggtggaaggaatgaacgtgaggttaaaagggaaaagaaggcatttccatacttcattccctcactgtgagcctgtgacctgggccagagaccctctggggtcccgtgtaggtctagaaagggcccttccctcctccctgaagctctccagcagggaasacatgatgagggaggcagtgtttgtgtgacccctttgcttctccttctttgatccttctctctctctctctctcattctcgctttcttgtgcccacatctcaagccctgtcaagaggaaaggagcacactgcctctctcagacactgtggtgtaaatgatttacaccacagacacttatttcacacagctctggaagcaggaaagtacaagatcagggtgccagcatggtcaggggcttatgagggcccccgtcctggtttcttcacatggcagggagacgtcatctctctcatgtctgttttttttttttttttcgaaacagagtcttgctctgttgtccaggctggagttcagtggcatgatcttggctcactgcaacctccgccctcaggttcaagcaattctccttcctcagcctccccaagtagctgggattacaggagcccaccatcacatctggctaatttttgtatttttagtagagacagggtttcaccatgttggccaggctggtctcgaactcctgacctcaagtgatctgcccaccctggtctcccaaagtgctgggattacaggtgtgagccactgcaccaggccttgtgtctgttgttatgagggcactaatccttcatggggactccactctcataacttaattaccccctaaaggtcctatctccaaataccatcacactggggctttgacctttatcatatgggtttggtggggggacacacgcgcagtccataagatggcccaagaggttccgtgccctcccattatacttattttacagagcagcattacaaggctcagagacagcaagggacttggccgtggccacacaactagtacatgcagaggcagatctcatctgctgacttctagactaggccccctgcctcttctgcccaggcccacgggtctttttatccccctttaacatttttgtttaaataatctaaaaattatctgggtgtggtggctcaagcttctaatcccagcactttgggaggctgaggcaagtggatcacctgaggtcagaagttcaagaccagcccagccaacatggtgaaacccggtctctactaaaaatacaaaaaaaaaaaaaaattagccaggtgtggtggtgcacacctgtaatcccagctacttaggaggctgaggcaggagaatcgcttcaatccaggaggcagaggttgcagtgagcaaagaatgagccccctccagcctggacaacaagagcaaaactctgtctcaaaaaaaataataataataatctaaaaactaatagatgtacagtgttgaaaaactgtaaaaagaacaaaagtgactatatccctcttctcctgggtgaaaactgacattttgaaggatctgatgaaagggcttttgatgcatttttacatgaaatgtcagtcagtaactcccagaagaagcaaagctccccagcctgtgaggtgtgcaggaagagcatagggcaggagaactggaagcaggtttgggcctgacaagagaattgatcttcccaagctgagcgaacctgcttgtcaattcccagagattcctcatcatggagcccatgtggtgtgggcagtgaccagagttcagggtcatcatgcacacacacacatgacacagccaggaacacacacatgtatgcacatagacccaggcacgtgcacacataaacaaagttgcatgactaggccccgagaggagctgtcttgattgcaaatcccccatctctagaggcccagaatcatcctggcacctccccacttctccaccaatagacagtgcattttgtaagcatccctcctgccttccgccaccagcacccctgccatgttctcatcacctctcccctacaccaagccccagcctcctctgattccacctctcccccaccttccatccatcccatatgcaaatcacacatcacctcccactgctgccctttgttatgaatcaggaccaaactcctccgcttgaccttccacggccttactgcccaattctacaggtatgctctccccagcccctctggaccagctactgctcctgagctggacagagccattcctatctccctttctgtgccatgtgcttcctctgctctgaattccctttctcctgtttgcttttccaaatccaattcttcaggattctgtccaacagccaattccccctcctgttatctagtcagtggctccctgcctcctctgggctctcccacagctctctgtttgctacccgcccttctcatggaaatgctgctttcttctgctgggtgtcagaaccagctgatgacacgtgcacatccaatggcagcacagctccacagcatggagcctggggcaccgcacactgtgggccttcaaagaacagcatcccccccgcctgcctctcccactaaaccttaggcttctcgagagtagggactgtatcttcccatcaccgagcatgtgacaggtgctcacaaacactgcatggtgcagccatggcgtgtggccttggaaggattacttgacttctctaaacttcaattttcccatctgtacaatgggaacaacctcacagggctgttgggaggattaaatggaatcatgcagggtaacagcctgacatgggtgaatggagaggaaaagaggtgcagggttccacacccagagccacatcacccctcacagctggttaccattcatcacagggagtcttcacactgactcctggaacaaattgggaaactgaggcccaaagaagtggtgcgcctgactcttatctactcaaggctgggattggaggctcatcttccttcagcggtgcctcctggctaccttggggtggggcactgactccctctgtcccgactgcttctttcaggtctccaccatcggaggcgtgacctatgagcgcgtgagcaagagactggcctaagcagccaggcccggcccagggagctacaaacccaccaataaaactgatataaggacagatgctgcttgctccagaacctctttgtttttcttttctggtgtcttgggatggcctctggctgggtgagggtgggaaagcccccaagggtggccacatgggcaacacattgcccctgagatccatgtgggattcatgtcatggcggaggaagacatgaatgtggatgactgcaatgctcctgcccctgggtgaggctgaaggtggcgtacaggaaacatggtgggcacacttctgtggccccttcgccccactctgccacccactactctgtgctgcttgaagcctcctttatggagacaaagtcagctgggaagggtaacgcattgattctcggatgggccacaggccaggcatatcaggacttgggggttgtggggtgggagctgtacctctaggaagggccccggctgctgggctccaaggctcaaagtggggatggaccagagctcacccagggaagctgtttcagcttggccggggctctgcttttattcactgtggagtcatccctttggtcctcagtttacccactgaggggtacaaagggggtccaggaggaccaatgatgggctgaggggaatcagtggtctatgagatggcaaaggggcaatgggggtgataggagggacaggagggactggagtgtcctggttttgactcatagggcttgggcggggtgcctgggaagaactttgagaggctatgggyggctgggaagggggggcggggtcacccagacatcaggtgcctggtgtcctgggttgagaagcattctgaggcagcatttgggtttggcagctgtcctgggacaatctctaattcagagtcctgaaggggacttttttcatcctcctctctccttggaagtgttaccacatctgggtaccaccttgacttcttttttacccaatatttttctttttttttgagacggagttttgcccttgttacccaggctggagtgcaatggcacgatcttggctcactgcaacctccacctcctgggctcaagctattctcctgcctcagcctcccaagtagctgggattacaggcatgtgccaccacgcctggctaattttgtatttttagtagagacagggtttctccatgttggtcaggctggtctcaaacttctgacctcaggtgatccatctgcctcggcctcccaaagtgttaggattacagacgtgagccaccgcgcctggctaccctatatttttctataagacaattcacttatttttactataatggaaaatcacgtcacttccatacatagacaaccactgttatttgccataagtagactaaaactatttaaaaagtcatagctgaacaatgttgacttctagctagattctgttgcctgcccaaggccctgggcctaaggcctccctttgtgaaaagggtgagagaggtaaaagacatagtggtatcaaatgggaaaatttatccttaactcatcaaaattcctgagagactactgaaaggagaatgtactcactataagaactgaattaccgaaggcaggtagtacttacattttttcgaatgtacaagtcccatacgtgagacataaggaataaggtttgtccagagctttgcacagggtatggcacacagaaggagcctaatacgtgctacctgacctaaggtccttccagctctgygcaatttgcagcctttcactcttgtgggccagcctcaacctggacagatgtcacagcycaggtcacaggcagccttctcttgcctcctcccacattctgctctgaaaccttgtttatctttctaagaacaatacacagcctctccccacccacccatccagcaaggacccatgaattccaccrttttgccaagacttattactaattaagtgaacyaggtaagcattaaactagcagtgttgctgtttcccctccagaatgaataattactcataatgagcttggataataagtctctaaataacagagttaactataattaggctgaaaattgagacaaggggagagagagaaagaggaagaggagagagagagagagatggagggagggagtgacctaagagataagagagaattttcactataattgattcaaggacaaattcaaattgctggcaggggagaaattttttttttttttttgagacagagtcttgttctgtcaccaggctggagtgcagtaatgtgatctcgggtcactgcaacctctgactccctggttcaagcgattctcccgcctcagccccatgagtacaggcacacgccaccacgcccagctaattttttgtatttttagtagagacggggtttcaccatgttggtgaggatggtcttgatctcctgacctcgtgatccccatgtctagccctctcaaagtgttgggattacaggcataagccacagcccccagccaggggagaaattcttaagcctgtattgttataaactcacagattcatagactatggaaaagcaggacctcagctctcaactagtttaaacwctgtatttcacagacgtggaaactgaggctcagagaggaaaagaaattcatccaaagtcacacagcagagagtgagtgagtctctsagagtagtaatgcgggtgtgggcttcactcactgatggagctacagtttctcagtgtgggtaaatggagtaaggtgagctggagaaaagcacctatgtcactggcatcttggcagggaggattcctcagccagaagagccggtggttaagagctttgactctgggctgggtgtggtggctcacacctgtaatcccagcactttgggaggctgagacaggaggatcgtttgagcccaggagttcgagaacataaggagacttcatctctacaaaaaaattaaaacattagctgggcatggtggcacatgcctgtggtcccagctacttggggggctgtggtgggaggatagaatgggcccgggaaagtcacggctgcagtgagccatgattgcaccactgcattccagcctgggcgacagagagagacccggtctcaaaaaaaagagctctggggccaggcacaggggctcacacctgtaatcccagcactttgggaggstgaggcaggtggatcacctgaggtcaggagttagagaccagcctggccaacacagtgaaaccccatctctactaaaaatacaaaaattagccaagtgtggtagcgcgtgcctgtaatctcagctacttgggaggctgaggcaggagaatcacttgaacccaggaggtggaggctgcagtgagccgagatgtgccatcacactccagcctggatgacagaacgagactccatctcaaaaaaaaaaaaaaaaaaatagagctttggttttggagtcacattaccaggatttgaatcttttctttatcacctagaagctgtgtcaccttggggtaagttcatccatttctctgagcctcagtttcctcacctgtaaatgggaataacaactgtacttacttaatggacttgctacaaagtcactcaatgttagtttctaccatcacctccatcatcacaaccatcactctcaggtcagtgcaatcaaagggttaggagtgcctctgtcactaacttgtgagtcactggacctctctgagcctcatcttggtcatgtgtaaaatgaattagtaagaccttcccttcctyggtcacagaggagttacaaggataaagggtaaaaatccttgctttgggaggccaaggcgggcagaccattgagccagaagttcaagaccagcctgggcaacatggcgaaaccccatctctacaaaaaatacaaaagttagccgggcgtggtagcacatgcctttagtcccagctacttgggaggatgaggtgggacaatcacctgagcccgaggaggtcgaggctgcagcggccatcattacaccactgcattgttgcctgggtgacagagtgaaatcctgtttcaaaacaaaattttttttttatttatccatgctcatgactcccagaaagttagattggcttcattatttgctgcactgtgcaagatgctggaaagactccccattccacagacctggttcaggtgccctttaccacaggctctccatgaccttcaccctgacatttgggagtcatctttcccactgtgccagggcacctgcctccctcctggcaagctcctttagtgaacttgggagctactcatagcatctttaaagatcaccactagggccgggcrcagtggcttatgcttgtaatccaagcactttgggagactgaggtgggcagatcgcttgagctcaggagtttgagaccagcctggacaacatggtgaaaccctgtctctacaaaacatgcaaaaaatttagctgggcttggtggtgggcatctttagtcccagctacttgggaggctgaggtgggaggatggtttgagcccaggaggcagaggttgcagtgcgctgagatcgtgccactgcactccagcctgggggacagagtcagacaatgtcttaaaataaataaataaataaataaataaataaataaataaataaatgaaagaagatcaccattaggtggcactctgccacctgcctgtcattccttggatacctgatgtgtttggggggaaggagcagtgaaatcttgagtgattgggcctttgtgtggctgtgtgtcaccgagggtgacatggcatggcgagatcttcagcctccacaatcctcagtatcgtcatctaggcaatggtgataatccaactagctcatggtggcgttgtgaggacaaaagaggagtaaggataagagcatgaggaaagtgccaaagacagggcctgccacatagtaagcgtgtacaaaggagctattaagggctcttcttcttttttttttttttttttttttttttgagacggagtcttgctgtgttgcccaggctggagtgcagtggcacaatctcggctcactgcaagctccgcctcccgggttcacgccattctgctgcctcagcctccagctgggacaacaggtgcccgccaccacgcccggcttttattttattttactttttgtatttttagtacagacagggtttcaccgtgttagccaggatggtcttgatctcctgaccttgtgatccgtccgccttggcctcccaaagtgctgggattacaggcgtgagccactgcgcccggccagggctcttcttgaaacgtctactggtgagaactggcacatacagggtagggcttcagagcagggagcagtgtccaagcctggctgtgcacgagcctctcctgggaaacctcccatctcagacctgctggacctgactctaggtaagaagaccatggactgccactgggatgtgctcccctgccaggtatgacctgggagaccattccagtcccaccctctcatttacagatggagaaactgagctctagaaaagggaaatgacctgcctaagtccacacagttgggagcagcagaaggcctgacttcccagatgtcctgcctgtgtgtctctgataagggcaggggcctagaaccagccagagctggcccagcagaagcctggccacttgaattcttcctttgaagtgggagctgggttggggggaggtgcagctgtctcacctgagccctaaagaagagggggtccacttatttccagtgttccttgtggaactcactgctgaatgataataccacgtgttccaggcttccttaccatacacctgaaccacagactaggttggcagccttccccttaaaatgaggagacagaggttcagaatggagtgatggctatcgtcaagaccagacacactcagacctctcacctctcaggctctgcattcttgtctagattgcacttcttctttttttttttttttttagacagagtttcactcttattacccaggctggagtgcagtggcgccatctccactcactgcaacctctgcctccctggttcaagtgattmtcctgcctcagcctcccaagtagctgggattacaggtgcctgccaccatgcctggctaattttttgtatttttagtagagagagggtttcatgttggccaggctggtctcgcactcctgatctcaggtgatccacctgcctcggcctcccaaagtgctgggattacaggcgtgagccactgcacccagcctagattccactctaacttaaaatgttttattggcttcctatttgttaaaatgttttaaatttaatttaaaaaattttttaaaaaaataatttcctagaaagcacagattcccagtttctctggaaacatggagcttacatctctgaaagataataccaggtaggggctgggtgcggtggctcacgcctgtaatcccagcactttgggaagccgaggcaggtggatcacgaggtcaggagattgagaccatcctggctaacaaggtgaaaccctgtcactactaaaattacaaaaaaattagcagggcgtggcagcgtgcgcctgtagtcccagctgctggggagccgaaggcaggagaatggcgtgaacccaggaggcggagcttgcagtgagccgagattgcgccgctgcattccagcctgggtgacagagcaagactccgtctcaaaaaaaaacaaaagaaaaaaaaaaaagaaagataataccaggtaggagctgagtagacatcatatcctttagggaaacactggctttatagctcaacacagtccccaccacctcgcactgtcagtcatccagctgtatttgcacacttacggtacctacctggccctggcgggcatttggacctgagacacctaccaaatgctttggtgtcttcttctgaaattcggttcacaagggtttactctgaggaacagatcctggttcatgagagctgctaagattctcttccaggcacctggtgccagggattgcctcagaaatacaaggatgctggttgctggcaaggaggagggcagctctttgggctgcttgacaagctggatggtgcctggaactggtctgagccagcactgaggcaggtcccctcctgggggaagctctggggaggccccaagcctggtcccaggtcttcaccttcacagatggggctgggagctcagggagcccctcccagatctaagcatgttagaagcagacagatggagccgcaaatcttgttagccggtggcagatgtgcaaggagctacggttctgtgtctgctggtgagcatgctctgagaaccccggccatgaatcaggagtgtgaacgccaggcaactctttgcttttatgaacccacgtccattgttctgtcctagtggggtgttccctaccaggtgagtggatggccagctgggccagccacggagactttacctcttgcactccgaagccactgggtcaggagcacaggatgctggggcgtggggttgaactgtggctccttcactgccgctgctgtccttaggcaaataacctctctgtgcccttattttctgatctgtaaaacacagctaataatacttcctattttgtagggttactaggatggctgtaggaaataatatgagcaaatgcctgaaatacaacagtaagtacttaataaatgttagctgtgatgactactgccaccaccaccaggagctattattatatggggtggtgggaggggaggtagtttaggcacagccatcaaatcaggtaaacaaattaattcggtcatttcagatggtttgaataccatgaagaaaatcaacagctaatgagagaatgactagggttgttacagaggcctgttcgggaggtagcacgtgagctgagacctacagcagggtttcttagcctcaacactattgccatttggagctggacagttttttgccatgaggggctctcttgtgcagtgtaggatggttagcaacatcctggacctctactccctatatgctggtagtaacccccctcagttacaaccaaatgggtgtccagacattgccaaatgtcccctgggggtcaaaatgacccctgttgagaatcactgatataaagggtgagcagcaggccaggcactgtggctcacgcccgtaatcctagcactttgaaaggccaaggcaggcggatcgcctgaggtcaggagtgtgagaccagccaggcctacatggtgaaacctcgtctctactaaaaatacaaaaattagtctggcatggtggygcttgcctgtaatctcagctaccggagagggtgaggcaggataattacttgaacccaggaggtggaggctgctgtgagctaagatggtgccactgcattccagcctgggtgacagagcaactgtgtctcagaaaaaataataataataataataagggtgaggagccagtcccacaaggactaaggggaagagcagaaacagctttggagagatgggctttgaacctggagggcagaaggaactggaaccctgactctaagccaaatccaggcatttagtctgcagtgttagtttggaaagaagcagattcttcttggaaaagaagtctgggtgtcctagcccttcactcagctaagccagagaaatgctgcatagaacaaagaaagaaatactaagtatagaacaaagttgaggtctaggactcaaatggttgacattcagacagggatgctacttccttactctcatttgagtttgggaaccagttcctgcacagttaatccttcaatgtttcttcaaagaaatcacacaggcagtctctgggtacctttgtgcacgtaaagatgggagagcaggtgcctaagtcggtgctgtttgtgtgtctgggtaacatctgttggtcacccactgcagaagcagttttcagatcaaaacatttcaaagtcctgcgtgcagtggctcatgcctgtaatcctagtactttcggaggccaaggcgggcagatcacctgaggttaggagtttgagatcagcctgaccaatatgatgaaaccccgtctctactaaaaatacaaaaattagctgggcatggtggcatatacccgtaatccagctaagcgggaggctgaggcaggagaatcggttgaacccgggaggcggaggttgcactgagtcaggattgcgccactgcactccagcctgggcgacagagcgagactctggctcaaaaaaaaaaaaaaaaacatttcagagaattggagggtagacagtgtggtgacgtctgggtacgagatagggaatcccctgactaccgagggcacagctgcatgaagagacacaacattcccatgagccacgttgcccagcagagataggaatagaaaaagcaatcaagttaaaaactgcaaagctaaaattgaactacttgggagctgtgatcacaaaaccaacttattaatgcagatccctattatggaaatggctgccttttgagacggtgtaccagcagtgtgtcaggtgctgcagaacgttcttggaggaagcccaccgaggctgctctgtaccctgctgcggccaacctgacttgaccccagccttcggctctgcatctctcagtgggcaagctaacccagctctttcttcactgacttactgtttcttaccttaaaaaataattgcagatggaaatcagttgtgtttggcagaagaataaaaataattgattcagacagtttctggggtatattaagtgttcttagattagctgaacctctcactttgccccaattacaaaaatagtggaacaaacgacataaaacaacaaaataaaacacagtggagtaaaacctcccttgaaggcccaggtcaacacctaacccactaagacttaatcgggtctgcctcttcggtgggtttgatgatggctggatggaggacaggcgccctctgctccctgcactacctccatctttttgccctagggctttttatagagtgacaatagccccgcccataggagctcacagtccagaatcgtcttaattcacacacacccacagtgcacacttgtatatttaaaagatagggaagaggctgggcgggtggcttatgcctgtaatcccagcactttgggaggccgaggcgggtggatcacttgaggccaggagtttgagaccagcctggccaacatggtgaaaccctgtctctgctaaaaatacaaaaattggccgggcatggtggygcgcaccagtactcccagctacctgagaagttgaggcaggagaattgcctgaacctgggaagcagaggttgcagtgagccgagatcggaccactgtactccagcctgggcgacagagtgagaccctgtctcaaaattaaaaagaaaaaggaagaaataaaagatctggaatcagtctttagcaactttaatacttcttgattttttgcctagtgtatttcatgaggaggtcagctcatttgctcccatttgaaccatgctgcctctgaaacttaattacatccagaaaggacacttgcatgctagtttatctatggtcagttgtggaataggtctgtttctatatgcacatgtaacccaaatgtcaaatataaattgggttaggtgggaaaaataattttaaaaggtggaaaaagttctattatgttgacatgcttaaatattggtatattgagtattctttcatcagcatctcatatttactggcaaatacaggtaatttctgtgtactttgagataattctgttaaattcatatagacgtcagaaaatacttttcaaaacaagctggaccaggcgtagtggcttatacctgtaatctcagcactttgggaggccgaggcagtcagattgcttgagctcaggagtctgagaccagcctggacaacatggtgaaacctcatctctacaaaaaataccaaaattagctgggtatggtgacaggtgcctgtagtcccagctactcaggaggctgaggtgggaggatcacttgagcccagaaggttgaagctgcagtgagccgtgactgtgccactgcactctagcctgggccacagagtgagaccctgtttcaaaaaataaataaataaataaataaataaataaataaataaataaaataaaaatttaaaaaatcaaactaaactggggagttataaaaatacaactgaaatataaaaaacaaacaaagaaatcatatgcctgaatgaccaagaagctggctaaagtgcagattccaggtccccacccctcctagagaaggctccaggtcattctgcagcttgctcaggcttgaaaacctctgaatttaacctgatgccagccctgggaggaactttaagactatctttgtgctttttaaagctttcatagctgtcctccagcatgggaattaacacaatcttacatgggagtgcccaagggtggaagaaatacaagtggatccctctggctgaaggccacagaggtcacagcctctgtggcacagtctccccccgccccaagagcttagaaccatccaccaacttgaccatctccatagtaacagatggagaaatggaagcccaaagagggagggatttgtccaaagtgaggtgggtgctcttggtcaacccaagacttgccttgtctctgaatccccaaaacttagagcttcctgcctcacctagccttgcacacagcgggtggtgagcactgccctcagccccgcccttggcggtgtcaaacacactcctgggtctgggctgcagcctcaggccctgagctcatcttcccattcctcccctaattgtctaatcaaaggcatctgcacttagcaaatgtctcagccccacagtgacaccggctctctggggtggttctcctgctggaagctgggtaggtagagggcaagacagaagtcttgagtgagactcccttcaaggaggagtacgaatctgacatttttcataacagctgatgctatatctcatcaattctacatatacatattttgacatgtaacgcttctgaaatcagaatgcaacatataatcaatggtatcttgcaaactgcctcatgatttagttttctaaaaagtcttattagtgcataaaataatagtgcatcttacaaaaagctgatcttatgcttgaagaaatataataattatctccttttttggaggtactggccttgatgtacattatgttatttaatcctcttaagaaccctatgaggcaaggtgttatcactcccattttaacaggtgacaagatggaggctcagagagaggttgggtcaactgccttccaacagctggtaagtggtgtgatcattaagtttatgtggcagcttggctaggctacagtgcctgttgtgtggctaggtactagtctagatgttgctgtcaaggtatttttagatgtgattaacatttacaatcagttgactttaagaaaagcctccataatgtgggtgggcctcatccaactggtaaaaggtcgtaagagcaaagattgaggtttcctggagaataaattttgcctcacgactgctaacacagaaatcatgcctgagtttccagcctgtgggcctgccctacagattttgaactctactgcaacatcagctcttacctgaatttccagcctgctgacatgccccacaaattttagaccacagcctctgcaatcacatgagccaattccttaaaataaatctctctccatatatatcctactggtttctttggaaaaaccctgagacggtgatggagctggggtgtcaagccttatacacccctccgctggcctctgtgtgcccagggaggcccagctcctactcagagggcaggactcagctcccgaggtcttgctgctgcccccaatattccaccctctaccatagggagatgctcaccagggctgatttgagagagggaaggaggggccggcccaagaggggatgcctaggacaagaggtgagagatcaagagcaggtgacgtgtttattgtgggacgcctctttctgggggtcgtgctggctgtgagggaaccctcacaatccccaggtcccagaacagacagatacaagaacttgaatccaaactgcttgcacataaatagaacggaggttggcaaaggaaaaaaaaacaacaacaaatgaacgtgcagcctcctatgctagtgtgacacggtggcagagtcttatccacaccccgtctcttttcttactgtctccatgctgagattttcagctgctctggaaagattcaccaccttccgatctgactcagcagcagacagctgccttcctggcggcccctgccacagtctccaggactggcaaggggctaaggaatccaagacaggtattcctcaaacaaaacaaaaattgcttccacggtcctttgcacctcccagttctgctgggtgaacaatgtgtcccccaaccccaaactaaaccaaagaacatgctgagcacaagctgcgagtcagaataaaaacatattgcacatggttacaagagtcttcctgagggccctctcgctgcagatccctaaatactggcttttgatccaaccagtcgcttgcctatcaatggtggtatcaaacgcccatgtacatcccactccccaaatacaggtgggactaagcaaattttccacattgctatccttcgctatcagccacactcaaagcctagactgggttaaactcatgccctgtaagtatgtggtggagagaggtgggaactgtttaaatctttgtcttcctttcaacgagcttctccctccctgggtagttattaaagttctagtggtgaacacagcctccaagacgtggaatcttccggaaccgagagctgggaaaatggttctctccaaccatatgccttcaaaaaggaagctctgtggttacctgcgggtccatcacaagttgggttcaaacttgggttccaaattaacagccctcatgtgggacaggcagtgtggcaattaaatttgtttttttctccaaaggaattttcaagtatcaccaaatccctgatacagtgtgtaaacaagacatcttacgaaacagaaagcaagaccacttcgggaagcagcagcacatgacatatctaaaaggctgaaaatggttttaggttcgaaaacaaaggcaagacagccacccactgtgcctcgcaaggcaaacactcaggcatacacaccaactcaggcccctctgcatagagccagggaaagaaaagcacccaatatgggatcctccgggggtcctgagaacacgccaggctgcccctcctttttcagcggtgtagctgccatcagcaaagaatagaaaagtctttaatgctaaaaactggacatgcttgagatcagtggtctgtgtccagttcccactctcctggcctcttatcaagtctttctcgattcactgggcccctgtgtggggggacggccaccaagccatccttttgtaccctagccacacgtggcagacgtttctcagaggaatgctctcgggtgaggtatgttattgaatgttttgctctgggtcagttttatttaaaaggagcacagaccctccacgttccaaggctcttcagggatggcctcctgctgcctcacttggctgagctctcctcttcagtgtcctcttcctctgcccacatctccaaggcttcctcgtgaggtctggaggtggcctatctgtcaaagcagccggtggggaacatgtggctcccactgaagtagctgcttccataggtggtggcgaggcagtgcctgggctcagctgcaatggccatatgcatgctaagggatgcagggacgggcacgggacacatatccaagggctgcagcggttggtacggggtgtggagggatgagcctgtactccccgagagcaggctccctgaacggtgggcctgcaaggagtcccgataggccaagcataggtcctgcacgggggtctggaactgtgccagggtggtcgctggctggccgagggccgggtaggctggtggctggaacagcacttgagtgggggtggggggtgtgccgggcaccattgccaaggcctggctcttgacggctacggcatccttgaggacgttgtcatacactctgaaacgagaagacctgggtgagaactggaggccaaaagccaccagatgcctgtgtgtgtctctacctgtcttgctaagtgggactggaagagatgcgtgtgtcctgtgtccaccaggccttacctggctgtgctcactgtgtgtggcaccgctccagctgttcacaaactagattcaggccttggctctcagcttggatctgcttcctacagaaaatttcttctggcccctccagactaggctggctgtccccacagccccatgctgccctatctccacagtcaataccccagagagtaacctgctccagagggtaacttctagttacctggcttccaggaggatggcgcctgcttgtgc

SEQ ID NO: 5617 - DNA, 14527 bp, Homo sapiens
ttctccacatcttcacccacacttgctatttttggcttttattttattttttaaaataacattctaatgggtgttaagtggtcagaaatggttcttttaggagtagagatagaggccagggggatggctcacacctgtaatcccagcactttgggaggcctaggtgggcggatcacttggggtcaggagtttgagatcagcctggccaacatggtgaaactccatctctattaaaaatacaaaaattcgctgggtgtggtggtgtgcactcccagctacttgggaggctgagggaagagaatcgcttgaacccgggaggcggtagttgcagtgagccgagatcacaccactgtatggcctggtgacagagcaaggctctgtctcaaaaaaaaaaaaaaaaaaaaaagagtagagatagaaaagcattgaaaacacagcctcagctcagctcagtctgccatggtgggaagccattaattcttcactcttgaaaccttttcgtccttggtgtggcagaggctgcaagtctcctctgcaactttattcttcccttctttctcagttataaaatccctgattttagaaatatctttattgagatataattcacataccataacattcactacaattgaatggtttttagtatattcacagatttgtacaactatcaccacaaactaagtttagaacttttttcatcatcccacaaagaaaccccacacccattagcagttattcactatttctccccaatcaacctcccctcccctcaatagccctaggcagccaccagtctactttctgtctctacctatttgtcttttctggacattttatacaaatgagattttacaacatgtagtcttttgtgactggcttttttcccctagcataatgttttccaggttcatctgtggtgtagcaggtatcagtacttcaaccctttttattgccaaataatattccactatatggataggtaacattttgtttatccattcatcaattgatggacatttgggttgtttccattttcttgactgttatgaataatgttgccatgaacattaatgcacaagtttttgtgcagatgtgtattttcatgtgtcttggttttatacctaggagtagaattgctgagtcataggagaactcctccatgtttaaccattaatgaactgccgaactgttttccaaagaaattgcaccattgtacaatcccaccagcaatgtatgagggtagaatccctgatttttaactgatcattgagctcaggcccattcaaaacaaagatgacatttcctaaccttccttacaagtagttctgaccagtgagatgggagaagaagttaggttttgtccttaaaagaaaggagagtggctgggtgcagtggctcacgcctgtaatcccagcactttgggaggccgaggtgggcggatcacctgaggccgggagttcaagactagcctgaccaacatggagaaacctcgtctctactaaaaatacaaaattagctgggcgtcgtggcgcatgcctgtaatcccagctactcaggaggctgaggcaggagaatcgcttgaacctgggaggtggaggttgtgatgagccgagattgtgccatcgcactctagcctgggcaagaagagcgaaactccatctcaaaaaaaaaaagaaagaaaggagagtacattctacactctcctctcctccaccctgccccctttccagtggctggatgtggacatggtggtaagctatcttagatcatgtggacaagggaaacacatagggatattagaacctccagacagaaggaacttaggaccctggacagctttgtggagcagtgctcccataccagcgtgaagttttgtatgggagaaaacatacatttccagcttttgtaagccactgttattttgggtctctctcagagcagccaaatatataatttaactaatatattttctttctgtgattcttctttattttgattatacttctacttctctgcccctcttttaggtgggaggtgctgctccaagcactaactcagaatatagaccctctccctcttgtaatagtgccagcttggagttctttgcttccactgtaggggaaggaaggaaaaaatatggagaactcacatccactcttcattgtcctcaaacagaagtaacccattttgttctgctcacagcccattggccagaactaactgtatggccccaatctaattgcaaaggagtctgggaagtacagcacagcacatggatctttggaaagcgttaattttctctgccaaaggcttcttttgttgttgttgttgtttgaaatggagtcccgctccgtcacccgggctggagtgcagtggccctatctcagctcactgcaacctccacctcccaggttcaagcactcctccagccttggcctcccaagtagctaggattacaggcgtgtgccatcatacctggctattttttttgtatttttagtagagacagggttttaccgtgttggccaggctggtctcaaactcttggcttcaagtgatccgcctgcttcggtctcccaaagtgttgggattacaggcgtgagccactgtacccggccaatactggtgttttctgacctcagcgtttttcttttctcctgccatgtactctccctagagatttcatctactcccaagtcttccactgctcctatctgctgatgactcccaaaactcagtctccagccgagacttctctcctgggcttgagacatatgtatccaactgccagaacatctccagtggacagcctttgggcacaaggccacactagcttgtgggtacaagtaatcacccaaagtcaatttcagtggctctccactcccacattttttcaacccctggaaatgttcccttcccaaatactctgagtctctcttctcttttgatgactgtggttttgtgactggatggtagctcctgttgctttttttcctttcaaatgaattttctcttaggaggcttcttagccattaagcaaatagacctcaactgggcttgccctatgcctatctgaaacccagcttaggttcgagttaggactcctgttaatctgagctctcacttcctgtcccaacctgcttattttttttggtgaaagaaaatatcatccccctagttgctcagaaacctgggaatcattgggattttttcctctccttcaccttcctcatccaatcagtcaccaagtgctatcaactctgctgccttagtagccctcaatatatacttacctatcaaccatcactgctatgccatacttcaggccttcatttctcacttggattattaaaatatccctaaatagttcctctgccttctctctggccaccctcctgagtgatctctccatcatgtacctttcagtgactgcttgcacaagcccctttgtgacttggtcatagtctgctctcttgaaccaccagagccaagcacctgggttctgattctggttgcaactcttactgcgtgatgatggacaggccacttgatctcctcaaacctcagttcctaaatcaaatgaatgattgaattcagtcacttaactttgtatgtagtaggtaggcactgtgcaaaacatactagtggatatagagatgaataagaaaaagcccctgcactcaaagagctctcggattcatcaacaaattattgtgcagttagatagtaagtgctataatccaggaatatacagtgttgtgtgaataatgtggaatcagtttatctccagagcagaaaaaggtgaaggccgaagaaggcattcagagtgatactggagctgtgtagcaggggctactactgttccctcaaatcctttcttctcttcttcctgagtaatagagtcctttttcagctaggcatacagccatccaaaataaaaactatatttcccagcctccttttcagctaagtgtagccatgtgactaagttgtggccaatgggatgtcagtacaagtggtaatggcaatatctgggatgtgtctttaaaaggaaggaacatgtccttctccttttcctccttcctgttccctgggaggtgaacttggtagctggaggtgaagcagctggaacttggatatgagcgtcttgttgatgataatagtgcaacaagataaaagcagcccgagctggcctacatttacatgagaaggaaataagactccattttgtttaagctattctcttgcatatatatatacacatatatatcagctaagtgtagccatgtgactaacttgtggccaatgggatgtcagtatgagtggtaagagcagtatcttgtatatatatatgtgtatatatacacacacacatatatatacatatatgtatgcaagaatataaaatatacatgtgtgtgtgtatatatatacacacatatatatgtcccttgcagccaagtctaattctaactaatacaaactaactctaaaaaatgaatatatattcaccaggggataggctatttcaagcagagggaagcctgtataaaggctcagggaatgctgtggttttatgtggcagcagatgagactggaaatgagtcaggatgagccacagtggaggatgaattaaatgggcaggagtgtggtagaaagacctgttggaggctatgaatgcaatcaaggtgacagacaactggtgcaatgatggtagtggaaatggaggagaggggattgattcaagatgcatttaggaccaagaatcgggagcttgtgaacgtgtgtatgagtactgtagacggagtgggtgtgtcatcagagaagatctgagcatttgggcttgctctcctcagaggccctgcgagtggagttcagcttttcctcatggggcaaatcttactttcgctccagttcctggggctcagagtccctggcccagatgcctcttgccatctcatcttcaccctgcctggcttcccttgcttgttccaggattgtttcataaagagggatgtggttggtctttaaccctatgaatgctggctgaggatgcctgcggaacctgtagtgaagctttcaggggctgctcgggttctggctggtaggtgaacactgtccatcttgccggctgggacacagtgactctgggtagttgtgtaagagaggggcccttggcagacaaacaggttcttctctgttggtgggccagccagcaggtcagtgggaaggttaaaggtcatggggtttgggagaaactgggtgaggagttcagccccatcccccgtaaagctcctgggaagcacttctctactggggcagcccctgataccagggcactcattaaccctctgggtgccagggaaagggcaggaggtgagtgctgggaggcagctgaggtcaacttcttttgaacttccacgtggtatttactcagagcaattggtgccagaggctcagggccctggagtataaagcagaatgtctgctctctgtgcccagacgtgagcaggtgagcagctggggcagagggatgggggtcacagtcctaagggagggcattgcaggtggcctcaggggagagcctggggtggcccctaagacgtcctcttggaacattttggcagagttgcctcttcgccctcattatggctcagtttttccaccatgaaatgggagggagggagacaggtgggcaggggagaggtggtagaagtggcctagagaactgttcctggggtctgggacctttgcgaaggggttagagcaccacgctccctgctatgtgactgaggtagcaagagcacgccctcttcccatgtctgaggaagacaccctagcctccttgactcacctaggtcagtcctcttgagccccaacagctctgtgctccccagcccaaggaaggggtaacaggatttcgggcagttgcccctgcagaggccccctgggcaagtcccctgcgccatgtcccttcgtctccttcttcccctaaccaggcctccctccacctgtcttctcagagcagrtaatggcaagcatggctgccgtgctcacctgggctctggctcttctttcaggtgggtctccgaccctgacttcaacgtgggggtgtgggtggaggctggccagagkgccctgtccaccctgggggaggagagcccaggccctgattacctagtccctctccacagcgttttsggccacccaggcacggaaaggcttctgggactacttcagccagaccagcggggamaaaggcagggtggagcagatmcatcagcagaagatggctcgcgagcccgcgtgagtgcccaggggaaggggtgtaggcgaagggaggagacagctgggccatgccatgatgacctgcctctgctgcctcaacctctgtggccgctgctgggacagaggaaaggagcggtgctagctctgtctgcagatcccggccatcctgggctctttagcgccctctgcctgcagcccccgccttgacaactccgtagctgttgcccccttgctcactgaggcgcgggacctgggatcaatcgggaggacgcccgctgcagtccccagaatcaaaggatgatgtggcgcatctatgtttctttggagagtgttgtaggtctggatttgtatggscaatgtgtttgtgcttcgtgcgtgagttgttactggccagggctaggacaagagccctcgaccctggggccaacgccctgcgtccttggttcccccagaggatcagtgcgcgatgacttggggacaaaggagatgatggrggctagcagtctgacggcctggatatctgtccccttctccaggaccctgaaagacagccttgagcaagacctcaacaatatgaacaagttcctggaaaagctgaggcctctgagtgggagcgaggctcctcggctcccacaggacccggtgggcatgcggcggcagctgcaggaggagttggaggaggtgaaggctcgcctccagccctacatggcagaggcgcacgagctggtgggctggaatttggagggcttgcggcagcaactgaagccctacacgatggatctgatggagcaggtggccctgcgcgtgcaggagctgcaggagcagttgcgcrtggtgggggaagacaccaaggcccagttgctggggggcgtggacgaggcttgggctttgctgcagggactgcagagccgcgtggtgcaccacacckgccgcttcaaagagctcttccacccatacgccgagagcctggtgagcggcatcgggcgccacgtgcaggagctgcaccgcagtgtggctccgcacgcccccgccagccccgcgcgcctcagtcgctgcgtgcaggtgctctcccggaagctcacgctcaaggccaaggccctgcacgcacgcatccagcagaacctggaccagctgcgcgaagagctcagcagagcctttgcaggcactgggactgaggaaggggccggcccggacccccagatgctctccgaggaggtgcgccagcgacttcaggctttccgccaggacayctacctgcagatagctgccttcactcgcgccatcgaccaggagactgaggaggtccagcagcagctggcgccacctccaccaggccacagtgccttcgccccagagtttcaacaaacagacagtrgcaaggttctgagcaagctgcaggcccgtctggatgacctgtgggaagacatcactcacagccttcatgaccagggccacagccatctgggggacccctgaggatctacctgcccaggcccattcccagctycttgtctggggagccttggctctgagcmtctagcatggttcagtccttgaaagtggcctgttgggtggagggtggaaggtcctgtgcaggacagggaggccaccaaaggggctgctgtctcctgcayatccagcctcctgygactccccaatctggatgcattacattcaccaggctttgcaaacccagcctcccagtgctcatttgggaatgctcatgagttactccattcaagggtgagggagtagggagggagaggcaccatgcatgtgggtgattatctgcaagcctgtttgccgtgatgctggaagcctgtgccactacatcctggagtttggctctagtcacttctggctgcctggyggccactgctacagctggtccacagagaggagcacttgtctccccagggctgccatggcagctatcaggggaatagaagggagaaagagaatatcatggggagaacatgtgatggtgtgtgaatatccctgctggctctgatgctggtgggtacgaaaggtgtgggctgtgataggagagggcagagcccatgtttcctgacatagctctacacctaaataagggactgaaccctcccaactgtgggagctccttaaaccctctggggagcatactgtgtgctctccccatctccagcccctccctctgggttcccaagttgaagcctagacttctggctcaaatgaaatagatgtttatgatagaagtttgcctggcgtgactctcatttggaccatgtctgaaagcagtggcctcaccactatccccaaagcacacccatcacccactccattcccttgctgctctttctcatccacccactcccagtccaggtctgtcaaagggggtctggctgggctctgcttcagggatcctggctagacaacggctgtctgtcacacctggcaggagggcctgggttacgggcccttcctctgcacctgcactgttcactagcctgctcccccacaggacactgtgcatggaatgcaggctgtgtctggaagagctgtggccctggtggacctaagattcctgaggtgggctgcctcctttgttcctgctgttctagagtttgaatggcctctttttatgccggactctcttctggggactcccctcactcaggggcaccaatgctccctatagatcccctgggaactgaaactggggtgtggtggaggacgtggaaagggtaaacacagctccttgtctttggacttccctgtccggccccctttcctcccagctcagcctactgtccccgggttctcagcacctgcctgctccccaaccccatagcacagaccccacacatatgtaggctcatcatgcctgcaggctggtcttccctgacaccgtggattttgacaatgttggcaacagaactgggttgtggacccagcacctggagagaggaagtgctagaaaggtagaaataataaaaggtgtttttgttgttgttaggaaactggaaaagcataggtcaagggctatgatggggatgaggaggtaggagtgaaaatgagggctgtgtacttgaggctgggattggggaaggtagtgatgaggacagaatagggagtgggaagaacagaaagggacagagggattcagggattgtgagagaggggaagaggctgagccacccggaggggcgacctagcacgcaagcagtatgtggcccaacactggaaccaagcagcccggctccgggcgcaccttctcagggattcctcagggacaagtccagccccttgtcgtcaaggctcttgtagaccgacgtagggaccaatagaaccccgtgcggtggagctattgtgaaggagcaaaaaagtgccctggttctaagaggacgtcttaggggaagtgacggctgagttgaggtggatccggctggcgatgtaaggttcgagccatataaacccgggaaccgggagcccttgacgacattgttccccgagtgcccggagtctgcggctttttttggggtggtggcagctggcggaagtgacgggagaggggtggggccgcgagagcggcggaagtaggaagccgaggtctgaattgcgcgtggtggccatggcggccagcggggctgtggaaccagggcccccgggggctgccgtcgccccgtcgcccgccccggccccgccgcctgcccctgatcacctgttccggcccatcagcgccgaggacgaggagcagcagcccaccgagatcgagtcgctatgcatgaactgttactgcaatgtgaggcgggggcgcggccgcgagcggcgggtgggtagggcttgtgccgggacgagccgggggtcagacccagccaggtgggcccggccggggaccccgaggagcgcccggagatagtagggcggggaaagggagtttcattgatttttttccttagctactttctacttcaccagggcatgacgcgcctcctgctcaccaagattcccttcttcagagaaataatagtgagctccttttcctgcgagcactgtggctggaacaacacggagatccagtcggcaggcaggatccaggaccagggagtgcgctacactttgtctgtcagggctctggaggtgagaggacctcagagcaggtacctcagtattctagagagagattcggtactggggtcagagctctggtccaggcggtcggatcttaaataaatccccctatgtctcctagccttagtttcttttgtaaaatggtactggtgttgtcatcagctcaagtgagataagatttgtgaaaatgctttgtaaatgttgtctgagggtatgaaatgagcagtagttgttatgaatagtattctcaccatttggacagcctggctcacaccacctgtactattcgaaaggagcagtctggaccctgtggagtggcgagagggagagacagctgggctgcggtctgatggaaggggacggtctggttattacttgaggagaagctgttctgcagtctctttgtactgaacgtattcttttcttcccaggacatgaacagagaagtggtgaagactgactctgctgccacaaggattcctgagctagattttgaaattcctgcctttagccagaaaggaggtaagtttaagatcagagtatttgggctgttcgcatgtagctagaatcttaccctctttcttgcaaaaccccctggtgccaggtctagtggtttgtgtatgggttctaccatgtaatcattgtaatcttcattagttaatcatgagtggaaagcttaggtaaaacagctcgagatggtagaaagtaatggtaataccatagtgtgtttattgtagaattttagcatcactattatcagacatgaatggaaccttgcacctggccttctcattttacagatgaggaaattaagacccagagagttcaagtgaattgcccagggtcatacagggacttgatagcagagctgaggctaagtcacacttgtcttttgttcttgttcacaagctctgaccactgttgaaggattgatcacccgtgctatctctggcctggagcaggaccagcctgcacgaagggtaagctggggttttctgattgtagcagctcaaggaataattgcttatatagagtgtcccatgtgtctgaagagtctctgactaagtgttggaaacttgctgggtaagcatatggtggtgctggagctgctagaatgttgcatatgttataattattgtcttttccacttccctccctcagtatatattcaggcctcatcagacaatataacattacctctgaagagcctttcctaatccccttgggttatctgtgtttcctgagtattccactgcatcttatatttattatgacagaagtaatatattatagctgcatctttagttatttgtctccttaattggttggggagtcccatgagaggactgatatatatactattatatctctaacgtggcatgagtgcctgggctaaatggttgaatgagtgagaaaaatgaggctcacctgtcaccacccgtcaacttcaggcttgtttgctacatctcattgtgaagcctgagtcactctgtttccactcacactgagataggtggtgacttcctaatggaagtaacatgggcatgacaaggggcagggcataaggtacaccaccagggctgatgctttactctctgttcatggcaggcaaacaaagatgctacagctgaaagaattgatgagttcattgtcaaactgaaggagctaaagcaagtagcctcccctttcactctggtgagtattgagaggctggagttgcccttgattaggggaggagggaccattaagactgctgggattttccactgtgatgcctgcgtggtctgatagtaggtgatgtaggattgtttatgattttcttttgcagtgactctctcttctcccatttgttagatcattgatgatccctcagggaacagttttgtggaaaacccacatgctcctcagaaagatgatgccctggtgatcacacactacaaccggacccgacagcaggaagagatgctggggcttcaagtaagtggactgaaggatccagaagaatgctctggaattatcgcgcactctggattgcttggagtcagtggaacttattttgctgctgctgctctgtgtgccctatctcagcttgtttgtgcttctcatcttgcttatgtccaggacttgggtaaacttcacagaaaggatggcagtggctgtgatcctatcttaagtcctgttcttcctttggttggggctttactttgtggtttctctaactgatgaggtggcacctgacataactgatgaggtggcacctgagcatttctcccactccagggcagggtgttggggacactgaggtatacctgccaacttgcgacctgcatctttgctattttaggaagaagcaccagcagagaagccagaagaggaagatctcagaaatgaagtgagtcacattggctactggtgaggaaggagcagagttgtgggctgagactgatgctgttcagcatctgtcttccttgtcaccaacatagatgaccactagcataccaactgagtgtctttagcctgaacatcccatctgggagggctcaccctttgtcctcatgttgtgttccaggtgctccagttcagcacaaactgcccagaatgcaatgyccccgctcagaccaacatgaagctagtacgtatcttttgccaagcagttgggttgctcttcatctgactcaggcatgaagattataatcaggctgggagcatccctttcaaggaaaacacatgctttatacccagtgataaggaagatattatctttgattagactgtgtaccttgggttttgtgttcaaagagaaaattaggccatggtcactaggctgtgtgtgtgtgacctgagccatgccttcaaatgtgtgaacagggattgccatgggttgggaacttgccctcttctggaggactctgtgggctgcctcttgtgaatatttcctgcagttctgggaccagcatatgtttgtgtggggtttggctttgtttttccccagatggtggtcttgttcgcctggaagtagatttccttaactccgttttccagaaatccctcactttaaggaggttatcatcatggctaccaactgcgagaactgtgggcatcggaccaatgaggtgggtgggcgccattatttgggaagaagactagcttaagggtaacccccttttaactatcattcttcctaagtacttcagtactcgggggcagggggtgtagagtagcttgggtctttttcttaggtctagtgcagggtgatgagcccttgaaggaatgggaattagcctagagaagaaaagttagagattctataacttgtttaagacatattaaaggttgatgatatggaagagagaagtcttttgacccactcctcagaggtgtggaagttcagggaggcagactttgacttcacaatgaagaactcaatagagctgtctgaaaatagaatgagctgccttagagaattataaattcccttcccctgagtgtatctgagtataagctaattaaattctttaaccagaatattataaaggagacccacacattggatgcagtggatgaaaggactgcaataaatgcttaaaagtctctttcaaccccaaaagtcttttttttttttttttttaaggtaaattcagagtttattggcaatttgggataagttttggcacgttaccagggttgggcactgttcctggccagctcttggtgtttttggtttgggcgactgctgtttagaaggctctttctttggtagctattaatggccctaactgattggatgtccaagcctacactccaggtctcctgggtaccaagtgaggctcaggtcttctctctgttgctcctgactgttatcgatgcaggtgaaatctggaggagcagtagaacccttgggcaccaggatcaccctccacatcacagatgcctcagatatgaccagagacctcctcaaggtaacagtctgcttgggaaagtcactgttgtcctcataagttagataaactgtctctatctaggggaagttgtcttttagaaataatgttcagggacatgaggtatctcctacttccctggctttgaggacccctgagcagagggagttaatctaagattggaa

SEQ ID NO: 5618 - DNA, 16371 bp, Homo sapiens
tatttaagccttttaaagtttctttcagcaacgttttgtagttttaagagcaaatgttttgcatttcttttgttaaatttatcctcaagtatgttattctttttgatgctattataaatggaattgttttcataattttcatttttttattgttatacagaaatacaattgttttttatgtattgatcttatatcctgcaactgctgaactcctttattagttcttagttttttaaaaaagtgttttccttaggattttccatatacaaaaaaggttaatatcatccacaaatagatgtagttttatttgttcctttccagcctggacttttaaatttccttttcataactaactgctctgaaatcaccagcataatgttaaatggaagtggtaagagaagacatttttgttttgttcctgaccttagggaggaggctttcagtgtttcaccattgagtatgatattagtggtatggttttttggatatgcgacatattttcttttacaaataatagaccaataaagtctattctaaagaatagaccaacaaacaattgtccacttttaccctgtttctttaagaaagcctgagtaagaggcaaaattttggaaaatacttgttttgctctaacgtgctgcagttattagataacatttgcttaacagacagttatttttccatccttgaatttatatattgctcatagccatagagacttaatttttatgtgtgcattttagtattgttagtgtattataaatatggctaaggtatgtatggggtcagcacaatgccactggggcccccttctgtctgtggactccttttcatctgtgttctaacaacattcacacatgtttgctttcaataaaaatggctgaagtctgttcactgcccaggtagttggtccagcctcctccacagacatcaagcagaaactcccatctaaaaagctgggcttggctgggcatagtggctcatgcatgtgatctcagcacttttggaggctgaggtggaggattgtctgagcccaggagttccagactagcctggacaacatagtgagaccccatttctgcacacacacacaaaagaaaaaaatcagctgggtgtgatggcacatacctgtagtcccagctactctggaggctgagataggcggatcacttgatctgggaggtcaaggctgcagtgagccatgataacactgctgcactctagtctgggctaccgattttgagactctgtctcaaaagtcaatcaatcagtcaataaataaataaaaagcaagacttcctggatggctaccagtgaccacaggggtctttgataaagcttttttttttatatatagcagtaataacaaccatatttgttaaacagctgctgtcttccaagaaaagtaatagtcactgtatgtacattttctgttttattttacactaatcctacatattagatattatatctccagtttttgggaaagagttttattttacactaatcctacatattagatattatatctccagtttttgggaaagaacaccagagattgaaataacttagccaagtaggccagtatgtggcaaaatgggggctcagacatactccacattgtaattctttcatccttaccacaggccggtgaatctttgtttcaccacttactagctgtgtgacattggagagtcactgattctctctggccttcagcttccacacctgggcaatggggacagtcactatggatgtctctagggcagatgggaagcctaagacaggacatgcttcaatttcttccctatgcctccatccctgattttttttcacaattgcttattgttattagtggtagaaatgcttggctggaacaaattaaatccaacagacatttggtgagtccctaccatggaaaagaaaccatgctggatattgaatacaatcagatgccgaatccaaattctagggacttgagtgttttcttttttgctaaaatttattgagagctgactacggctcctctgttctaaatgctttacatgtataacccatttaatcttcatcctaacactttgaaggagggactattcccattacacagtcaaggaaactgagctacacggggaggggttattagtcaaatcttaacaataaacaaaaacttgtgaatgccggagctgggtctccagtgcagccaagtcggctccaaagtccacactcttaattcaccctgaggctctgaggtcccccatccttgtctttgcaggtgaatgtgagaaaatcaccctggagaggacaaagaaacatctaccacaggtgctccaataagctctgggcactgtctagttacaaagcgtgctgttaggtgtaaggggatacaaaaatgtgtgggaatctggagtataagtgcagcaaaaagtgtggtatatgcatgattaggtacagggcagggagggagtggtgagtactaaagagctgagagaacgacctgtctatgggaatcacagacagatcagttctggttgggttattcagaaaacttgctgatggggaagcttgaactgggacttgaaagaatggaaagatttcagtgggtgaagagcctggcagacgagaatgttgctagcagagggagagacatgaactacagggtggagatgagcggacaaggtgcttctctgacagtgagcaggagcctcccttgccaggatgtttcctcattcatggagaccagcagaacactggtccttgaagccttgtgaggtgcaaggggtgcaggctctgggtccaaattccagcatagccccttgagtgcaaattttctcatctgtggccacagagtagaggcactatcgcgagcatcttcagtgcggaggggaaagagtatgggctctcccagcgggtgggagcagcactgagggagtatgaggatcagagtagcctcagccacggtggagagctggagagataagcagcaaggaaaagagctggggacccaactgtctcagcataaattgagaaggcaggagcagtgatcaggggaaacaagacacaaaaactaggcagtggatgaaggagagcagaaagtcaaaggcaagtgcatggtttaaaacctcagtggaccaactattgatactgggaaagatggggtaagggtcccttctagaatactccctccccaatctccttggacactgctatcactgccaggggaatgggtaagttcaccaaaaggtgggttgtaaagagatgatgaagaccaccagcaaaaccttgagaatggccactctagtgggtggtacaagaggatcccaggggcctccccaaggctcacaggagaggaagggaggaaaacatgtgtctcaaaagtaattggaggaggagccttgagaatggtgaagggtcacaagtgcaaatggcaccaaggcttctagaaggatggctgaaaacaagattttggcaacagtatttaggaccagatgggtgttcttcaagggagctgtttcaggagtaaagcaagtctgctggtgggccagagtgagggcgctgggccaggaactgggccaagcattgggaagtggatgtgttatctgcaaagggataggaaggagtggcccaccctggtgtgcagggggcacagataggaagatagggatggggcaagaacacagacaggggaccttcagtcaccagaaggtagtctaaaatatgcaaagcctccaaggtattggctggagaggaaaaacaaagcggctgagggcaggccccacaaggcaaaggtatcctgagggtcaggggtaaagcccttacaggtgggaaagccaagtgggtcatgtccacccatccttgtgtagggcaacccagacactgtggtaccccccatgggacaatgctctgcttctatctgttgttgctctagtttctttctaatacagaaacatccaacatctgcacctcctcatatagggttgatccaagtttcacagacatcactgagttcttagtggactcagctattggggctgttctcacactttttttttctttgcaagaatcagcaatgggtgcaagtggacctgtgtaggacgtccagtgaaacattgtgttggtgaatcagctagaatccatccaagaactcagccagcctggtgtggggtgagatctgatccttgaatgtccctcagtggcttttagggctggcaggttcagaagggccctctcatcacccccccagggcctcattccttgtttaacactttgctatcacagtcttgaatccttgtaattgaacaatggaccccacattttcactttgcactggtttctgattctgtaaccgatcctgtccccctctcttgtctcattcactctgggaattgtccccacattctgagacctttcagcagtgccccaacgaggttcctgcccttatctgaagctccaccctcacccccatggcggcaccgcaggcagccctgcttttgcgtcccgcgtaggcaggctgtgcaccggagtcacgaccccctgattcagcctaggcagccacagcttgactgctcccgccggacaagccctactgtgctatctgccgctcttcccttcctcttcccaggggstccgcgtcaggggaggcgcagctgtgtgcattccgggagcttcagacccccgtgtccagcagctccttcgtttcctgggtgctggggcggccttcccagcgaagagctcaactcagcgggacgtttggaggctctctgccccaaggcgctggggagtgtgcggcgggacagtcgtgcttgcctttttcactttcagagtgtccacgccccacccgtttggtcactgcaggtcagtccagtccagcccggcccaccccaccggtgcgtgtctgtcgcacgtggcagacgccatactctctgttcttgtttaaagcccaggatctactgggccctggaggcaagaggtgaacgcagcggaatccacgctgagctgcccgggaacggagcttccaaccccagaaggaggactctgtgctcctacaccttaaccctttttagcccgaaacttctccaacttccttggctttgtttagagctcgacagcgccgccccctggcgctcgttgtgaggacagtagaggagagaggcaagggtgtttttaaacagtttgcctctcaccattatgggggcgacccgagggggagacccactcttccgcattcccggtaagtgaaccaccggaagaggtcgaaagtgacggattcccatgtcctcctccagccccccccccaccctgcccatccacaggacggtggctcttcagtgccctttgccgagcaagtggcgtttctatgcacgtgggtatcaattcggactctggacgaaatggaaacctccttagccgacccgggtgggatcagctgggatcctgcgcgctcccctggggggttgccagccactctgttggggtgcaagaagcaccatccttcggaagctgggccgaaactggccaggctgactcgctcccacgcgcccgcccctacccggcgccgcagcaattcacctgccaccgcctctgagccgggtccggacttcggcgccctgacagtgtccccgcgacttccccacccgatgagatggggtctggcgttggccagtgcgtgtccagggactcgcgggtccctggccagccatggggcagagggcgctggtgttaggccagtcttccccaccctgccccgtcaccccagccacacccactgtcctgtgaggccaagcgcgctccgctggtttcctgagccaggcaccttggccgcggacaggatccagctgtctctccttgcgatcctgtcttcggggaagtccacgtcctaggcaggtcctcccaaagtgcccttggtgccgatcacccctcccagcgtcttgcaggtcctgtgcaccacctcccccactccccattcaaagccctcttctctgaagtctccggttcccagagctcttgcaatccaggctttccttggaagtggctgtaacatgtatgaaaagaaagaaaggaggaccaagagatgaaagagggctgcacgcgtgggggcccgagtggtgggcggggacagtcgtcttgttacaggggtgctggccttccctggcgcctgcccctgtcggccccgcccgagaacctccctgcgccagggcagggtttactcatcccggcgaggtgatcccatgcgcgagggcgggcgcaagggcggccagagaacccagcaatccgagtatgcggcatcagcccttcccaccaggcacttccttccttttcccgaacgtccagggagggagggccgggcacttataaactcgagccctggccgatccgcatgtcagaggctgcctcgcaggggctgcgcgcagcggcaagaagtgtctgggctgggacggacaggagaggctgtcgccatcggcgtcctgtgcccctctgctccggcacsgccctgtcgcagtgcccgcgctttccccggcgcctgcacgcggcgcgcctgggtaacatgcttggggtcctggtccttggcgcgctggccctggccrgcctggggttccccgcacccgcagagccgcagccgggtggcagccagtgcgtcgagcacgactgcttcgcgctctacccgggccccrcgaccttcctcaatgccagtcagatctgcgacggactgcggggccacctaatgacagtgcgctcctcggtggctgccgatgtcatttccttgctactgaacggcgacgscggcgttggccgccggcgcctctggatcggcctgcagctgccacccggctgcggcgaccccaagcgcctcgggcccctgcgcggcttccagtgggttacgggagacaacaacaccagctatagcaggtgggcacggctcgacctcaatggggctcccctctgcggcccgttgtgcgtcgctgtctccgctgctgaggccactgtgcccagcgagccgatctgggaggagcagcagtgcgaagtgaagsccgatggcttcctctgcgagttccacttcccagccacctgcaggccactggctgtggagcccggcgccgcggctgccgccgtctcgatcacctacggcaccccgttcgcggcccgcggagcggacttccaggcgctgccggtgggcagctccgccgcggtggctcccctcggcttacagctaatgtgcaccgcgccgcccggagcggtccaggggcactgggccagggaggcgccgggcgcttgggactgcagcgtggagaacggcggctgcgagcacgcgtgcaatgcgatccctggggctccccgctgccagtgcccagccggcgccgccctgcaggcagacgggcgctcctgcaccgcatccgcgacgcagtcctgcaacgacctctgcgagcacttctgcgttcccaaccccgaccagccgggctcctactcgtgcatgtgcgagaccggctaccggctggcggccgaccaacaccggtgcgaggacgtggatgactgcatactggagcccagtccgtgtccgcagcgctgtgtcaacacacagggtggcttcgagtgccactgctaccctaactacgacctggtggacggcgagtgtgtggagcccgtggacccgtgcttcagagccaactgcgagtaccagtgccagcccctgaaccaaactagctacctctgcgtctgcgccgagggcttcgcgcccattccccacgagccgcacargtgccagatgttttgcaaccagactgcctgtccagccgactgcgaccccaacacccaggctagctgtgagtgccctgaaggctacatcctggacgacggtttcatctgcacggacatcgacgagtgcgaaaacggcggcttctgctccggggtgtgccacaacctccccggtaccttcgagtgcatctgcgggcccgactcggcccttgyccgccacattggcaccgactgtgactccggcaaggtgkacggtggcgacagcggctctggcgagyccccgcccagcccgacgcycggctccaccttgactcctccggccgtggggctcgtgcattcgggcttgctcataggcatctccatcgcgagcctgtgcctggtggtggcgcttttggcgctcctctgccacctgcgcaagaagcagggcgccgccagggccaagatggagtacaagtgcgcggccccttccaaggaggtagtgctgcagcacgtgcggaccgagcggacgccgcagagactctgagcggcctccgtccaggagcctggctccgtccaggagcctgtgcctcctcacccccagctttgctaccaaagcaccttagctggcatkacagctggagaagaccctccccgcaccccccaagctgttttcttctattccatggctaactggcgagggggtgattagagggaggagaatgagcctcggcctcttccgtgacgtcactggaccactgggcaatgatggcaattttgtaacgaagacacagactgcgatttgtcccaggtcctcactaccrggcgcaggagggtgagcgttattggtcggcagccttctgggcagaccttgacctcgtgggctagggatgactaaaatatttattttttttaagtatttaggtttttgtttgtttcctttgttcttacctgtatgtctccagtatccactttgcacagctctccggtctctctctctctacaaactcccacttgtcatgtgacaggtaaactatcttggtgaatttttttttcctagccctctcacatttatgaagcaagccccacttattccccattcttcctagttttctcctcccaggaactgggccaactcacctgagtcaccctacctgtgcctgaccctacttcttttgctcttagctgtctgctcagacagaacccctacatgaaacagaaacaaaaacactaaaaataaaaatggccatttgctttttcaccagatttgctaatttatcctgaaatttcagattcccagagcaaaataattttaaacaaaggttgagatgtaaaaggtrttaaattgatgttgctggactgtcatagaaattacacccaaagaggtatttatctttacttttaaacagtgagcctgaattttgttgctgttttgatttgtactgaaaaatggtaattgttgctaatcttcttatgcaatttccttttttgttattattacttatttttgacagtgttgaaaatgttcagaaggttgctctagattgagagaagagacaaacacctcccaggagacagttcaagaaagcttcaaactgcatgattcatgccaattagcaattgactgtcactgttccttgtcactggtagaccaaaataaaaccagctctactggtcttgtggaattgggagcttgggaatggatcctggaggatgcccaattagggcctagccttaatcaggtcctcagagaatttctaccatttcagagaggccttttggaatgtggcccctgaacaagaattggaagctgccctgcccatgggagctggttagaaatgcagaatcctaggctccaccccatccagttcatgagaatctatatttaacaagatctgcagggggtgtgtctgctcagtaatttgaggacaaccattccagactgcttccaattttctggaatacatgaaatatagatcagttataagtagcaggccaagtcaggcccttattttcaagaaactgaggaattttctttgtgtagctttgctctttggtagaaaaggctaggtacacagctctagacactgccacacagggtctgcaaggtctttggttcagctaagctaggaatgaaatcctgcttcagtgtatggaaataaatgtatcatagaaatgtaacttttgtaagacaaaggttttcctcttctattttgtaaactcaaaatatttgtacatagttatttatttattggagataatctagaacacaggcaaaatccttgcttatgacatcacttgtacaaaatmaacaaataacaatgtgwtctcgggttgtgtgtctgttcacttttcctccctcagtgccctcattttatgtcattaaatggggctcacaaaccatgcaaatgctatgagatgcatggagggctgccctgtaccccagcacttgtgttgtctggtgrtggcaccatctctgattttcaaagctttttccagaggctattattttcactgtagaatgatttcatgctatctcygtgtgcacaaatatttattttctttctgtaaccataacaacttcatatatgaggacttgtgtctctgtgcttttaaatgcataaatgcattataggatcatttgttggaatgaattaaataaacccttcctggggcatctggcgaatcccagctgtgtgtccggtgtatggtttggcattatctcctctgcgagatatccaaattcactgtagtcatgaagggtctcagtttgtggctctcattcaaatattcatttctaaacgtctcatccagtatgaaatcattctcatctcttttggagattaacaacatcatcttttcaatgcacacgtttcttgggctcacttttctaaggtggtagggctggctgaatgcaatatgcagggctcggaaagattttttaaagaagaaattaaaagcaagtagagtccaggcaaatattcagatgctttatatgtctggataatgctgaactcatgagttttagtttgactgattattgtgaagaccgggttggagattttgacatccatcgcagaagaagtaatggctttagtgtgtgtgtgtgtgtgctggggaagctccatgcacagtgccctatggagataacaagctgagccatgctccccctaagtagcagactaagtctttgtgaaggaagagctacacaaatgggggcaggacaggtgcagataaatggggctgggagaccagaggagacagtgacaccttatagttcgccccctgttacccagccttctgtttgtcaaaagagtctgctcccagtcactgtcaaactgacttgtagggcctcattgcgttaggatttcttcttattccagaagaggggcattttcttaaggaacactggaagaccaaaacacactttcaaaacctagaggcaaaaacccttcatgcagcacttgggccccaggacattagttgtgcggggccctgagcttccctgtcctcctcacttcctgctgcctgggggatcagcagttctgtttataggtctcatctgaacttgagattctcaaaacgctaaatagccatagtgcctctcagggaaagataccaggaccacataaacaaatcagttagctttaaaaactatccctgagcatttaaaatcaggatagaccttgtgaaaccagagccatgggtcaacctgtgtgatctctgctttctgttcacatcattggacatccaggtctgagggagactcccagggaccagttgctggtgaaatttcatagcacaaaagtccggggcaagaaagccaaggtggtatttctggataagccagcattcaagtttgtttgtttgtttgtttgtttgtttttcctagcctgctgttttaaagtaaacagaatgcatttttttaagtcaaatgactttgttattttttttttccagttctcacctatttcttagattagttcagcaattatttactgagcatttactctgtgcctttcatagtgataggcacaatgacaagtccctaccatataagttagactctggcaggggagaaagatgcaaaacaactgatcacccccaaattgtacttaacttagaaacagtgataagtgcaggggaagaaaagcacagcacactctgaaaaggcgcacgaggaaggcaggatttagagtggaggactagagggagcttcctggacaagctgacacttaacaccagacctgaaggggaaggaggggtttgtcaaatgcaaactggaggggaagcagtccaggtgggaaggatcacacctgcaaaggccctgtactgggaagagccctggtggagcggactgggcatagtgaacaaggtgaggtgggctgcaaggcagctgaagaggtggaaagagagatacaagcagtgggagatgactgtaggggctgtaggtcaaagacactgaaaaaaagactgaaagagtgacattgaaaaatgttctgggtgcaagtgggggcactcaaggagttttgatgagagtgcactgggattcaatttatgtactgcattgtttgggaagataacaactacttctagatgtatttacatgtccctcttgggcaggaacctgcacaatttccgctgtaagcaccccgcagggctgatatgtggtgtgaacagcatacacacctgggtgtgaccccagcctgamacctgctggtcacatggccacgggcaccacatgacccttcaaaggctgtaagacgggttcaagcagtgccgcctcacaaggtttccaggaagattagataagctcagtttctggcccatggtagatacccaataactgtttacttgtgtgccagtgaactggtagatgcataaatgagtacagaaaaaagctgtgttggaatcatgagtgtcttacgggcaaactcaaggttgcacaaagtggatactgttccatcaagggaagatgcagttgcttggagcaatgttgtcaatgctagaggaactgtaatgttggatttgcaggcatctatatcatagcttaaacaggaagatttttgtgccaggtgagaagtgagctccaacactcggtcactctaaaatccagcttcgaaggcttcagcttattttcccttctcacaaggcttagtcaagtacaggggacagagactccctccgctgttctcccaaggaggctcggaggaggaagaacatgctccagagtgcccttctccatttctcagggcccagaggagaaagagaaacatagctctggccccaacagagccagcaggaggtacggagggaagttcctgtaggtgacattcctttgagagacattatggttgtggatggggccaggggacagaagatcccccacctcctaccttctggagtcacttgctattctctgttgaatgcgattccttattatatcatctattcaaggaaaactgaggttgcaaataatacatgaaaacacattttcttcatggttatagctgagtgggggtacccaaaatacatctcctgagctttagaagcatttcttcataaaacaatgcagacaatgcccagttctttctttctttcttttccagaatgaatgccctgggttcagtgatatctctttttgttttgagtgttcccttcctcattttttttttttttggttagcaggttcagatgtaggcaaacaactgatttcttctcacaagggaagctaaatattgttttaacatcagatgctaatagaatcgaaatccttttcagggtgttttgaaagtgtgattgtgaaagacaaaagaaccctggggatgggttaactcaaggttacgcccactggagagggggagcagagagcagagggtttcagggatccaatgagaaacaccaagagtcaaagctggggtctgtgacaattatgccacctgggccacaggccagatatttccttggatctctgcctgaaggaaatcttctcttaaaatagccattttaataccgatattatcctaagacaaaacccacttatcttctgcatattcaacgcctggcaatataacctctgtgcttttggttagaggttagcacctctgtgcccatctcaaatcttctttctgacttcttgctaatgccgtacctaaatgctaagttaccccgctgttgtccagcaaagctttgttctacttggcaaagaggagaggggcttttccacattctccctaattcctccccttttcccactgcctactgccttgtttcgatttaaatcctttgggaacatggatcccaccttccacagactctttggagatcctacgccttgttcattgtccccctcttttaataaatctgttctgaaatgctcatataatcccaaatccccattttcagcgagcctttgccagggtttgactccagtctttcttcatgtattttccccctcctccaaaaaggtagcatgcagaaacccaagggtagtgccaggagaatggaaagtctgaaaagggcatggggcaagtcccagtttcactgtttaatttgtctatgactctccacagcacaggatacggccatgataaacatgagcaaactcaacagcaagctgcctggaggcccgtgacaaacggaaatggtgcttttgggatgcggctggatcttgaggagcactctgctctgtttggcggaagggagcttggagtggaatccacaccctctctccagtgcttggagtaaaggatcacgaagtcattatggaattagcagcttgcccagggacatactcaaccctctagtttctccaggtggtgtctagattccaggatacttcttttcagatccataaggtcaagagggctatagcttcctatgtaaattggttgaggtctcctagtctggggggatgaactcgggaaatggtataaccaggtggcctccatggatttggggatagcaccatctccaattctgtacctcctcaggtcctccccatgctgtctgtgtccttcctccttggccacaaatcacagccactaagagggaagtagatggtgaccaaaacagtcccgatcttgattggggcaacagttagttgccccaatgtaaaatgtaaaattgtaaaatgtaaaatgtaaaaatttgcatgtcaaaattcatagaactgtacaactagaaagagaacactctaccatatgtaaattatactccaattaaaaatagattaaaaagaaattacagcctcttcagaacactaatgaaagcctgattaaaaaaaaaaatggaaaaaaaagacacccaactgtgtaccaactccctcttcctccttctatatcatgaagtagtcaccatttgaatggtaaaccttcctcccctgggccaggaacatggcctttgtgtgtcactgtgcacctgcaggtggatactgttgctctgccctctccacacagtcatgcagccttccctgggccactgtgggctggaagtgggagagccggaactcagtcctggtttgtgtgcctctcaatttgttctttctccccatctacgacacgttcacactgggtgagtgctgacctttggcagccccactctttaggcagagccccagaaatccagtcatttcaagtgctatgttacggcaggtggatgctcatggtgtcttttgacaataggaagccacatgtttttctttgtagaaagtcaatactcccattctaggcatttttttacataagttctcccccatttcagaaggtgcccccactgttaggcactaaagtcccttccttcacaggattgaggtccctgcctttcagttcatataaagttgatgaaagttggaaagaaggacatgatcatcctgccaacccctccctgaaaagcagaggcatgttaagcctcaatttcacaaggaccccaaagcttttgataggcttctcttactaggcagacccaagcccctcattagagcctgccaccactgacccctggctcttaggacacagccctcatccttgaggtggcatagaaggcattaggctcctgctcatgtgcctgccagtgcctcacacgcccctgtggtctgtgttttggtcacattgagcccttcagtgcctcccactgcaagctctttgcacatgctgttccctctgcttagagcttacaggaacaccttgtgccccgccccttcctttcctagttaatgcctaggtacgcttcagaggaggtcatctccagccactttcctggggaaagcctgctctgagtcatgggcaacttcttttatcatcatctcttagaaagtacattcctttcctgcacagtgcttatttaggtttagaactgtactctcatttctgtgcttatttgattaatgcctgtcttttgccactaacctccaagctccatgaaggcagaagctgcctttgtagactcatcgttttgtctggaaacctgttgcaccacccgagagaagcactcagcgaactgtccacatgtatacccccatgcatgctagtcagcaagacagtttccagggtgtgctgctggctgatggtgtacaccatggtggagctgtctcagaaaacacagccctaggattctaacatttgtccttaaggaatctgaggctatgctgtc

SEQ ID NO: 5619 - DNA, 59914 bp, Homo sapiens
  misc_feature (1)...(59914): n = A,T,C or G, or insertion/deletion polymorphism (see Tables 1-2)
gcacatcctaacaatgctgacagatttcaaataatttaaatatgctaaaacatgcaatgtttcatatagaaagaaaattgaattcatttttcattaagagatgttttcatttagaaaattttcatttgggacgagaaatctacttgggcttgaaccaaagcaatactaaaatcaggaacatttactatggtagttttccttgttgttatctaaatcttgctgaaccaattttcttagctgtcatgataattcagaacaataaaagacactgtgcaatattgtgtaatcttttaaaatgccaataagaattatatctgataaaaatacacacattttataacataaaaccgttatcaacttttatatcttacagcttagattttcatcactagctaatttccttttaacactaaataaaagttccaaaatcagtacataaactcgtaatttaacctattttagaaaacaaaaaacatttctgtgtgaagggaattacagaaatgtcaactgagcactcagtggttgaaatgtccaagttttgtggaggtttcaggttaaaagcaaagagaaccacaagctgtttctcatctctgagtgatctgtgctttctcatcacatacctggagtaagagattggttctgaaggaaaaagccgggctgctggggctggcccacgaggttgtaaccccacaasgtggactgtggatggtgcatcatttgggaggagataggcgagtaattaggaggcactcggtatatgttgctctgtggatattccttcaacataaagttttttaaaaagttacgtaactccacatatcacacagctaattaatgcaaataacttcagtaagctatctgaggtacctcctatcccaatgtacaaagctgttttttataaaggagaagatggaaggaagagtgctaataaatcccctggaaatattcatttgaggtaaacttttccttgacttaaacagtgcttggcttgcagtgggcagagatggaaaaggatctcttctgaattctatttcaaaagactacaagtgtgtcaggaataccaatactgaacgacactcatcactgaaaaagcaccttcagttgctaagactcatgatcatttcatcttagaaggcctttccaatatcttgggtctggagaattacgccagagagccctacagtgcttcagaaccactctttggccaagatggtatttcacttgcaattttccagacatcgttctaaagaagtagacactcccctcatcccccatgcttcctcttccttatagtagctgcaaagcctgtaaggatcacacctgaaggtctcaatttccctaccttccctcatctagtctagccctagaggatggaagagaaacaaaatctcatttccctgcaattttactgaagagcatatctcattgaaaagagggagcttcaggaagaatagaggaagaggggacatgaccagactgacctggggagcaggattggtttcagggctttttcatcagaaaagaacaaaagcccatccacgtggactgacaggctggaaaccccaaatttgagggagtgtcagtctggaccattttaaacttcccttcaagacaaaggaatactggtaggaagactgaatgagaagggggcactgatgctcaagtggcatcctaaagtggtggtggtcatttctaaaatagtattaatcaccaagctatcagctaggaaaagatgtattttagttctcacataggtaaacaataaccaatcatgaatatctgaatgaaatggtgaatatttcttccactgtgcagcaagaatgctgtggaatttcattaaaaatgtctcaaatcctctatcaaatattttccaggttttaatttaatttaaatagaaaaacattttatgcattacttctcaaggtttataaaattatttctaaatcaccatcaaatagatttctgttgtaatgaaaagattattatacgtggggaacactaatagagaaacaagaagtaaaactattttaaattaggcttattttcatcttttataaagtctgaaaacatggtaaagaaggaaaatatatgagggtaagatggaatagtaaaacataaaatctcaggaacatcctattggctatgctaactccaagttttatcaaagaaaaaccaaatagagctttttatgttaatttactgaagatatcaaccacttaaaatacaataaatattttagacatattaaaaatatgtgagagaatgggattgtatagttctaaaaatttcaagtttcaaacccgaggaaattaggaggcactgaaatattaattaaatattacaatggaagcctacaattaaaataaaattattaaaagtggaggacggaaaatcaaaagctttaatcttttgtctgtgacaagtcattgtgtgccattcagttaatgcagaaacctgttaggagaactgtcataacaaaacttatcctgctcttggtaatgtttcgagggatatgatttgggcacgagtaaatctcatactaaatgctaatgagccaaggttctccttcctttycccacttacatcaactcttgagctagatttcgtcttgcgcttccttccttttgttttcttttcttcatctgttgtggtttttccctgatctgacagctcagcggacttcctttctggttcctgagaaactggagatgtgggctcttcctcttcctcctcaggaggcaggggcagtggctggaggtagtaactgcggggcttgggcatggggtgtgtgtgatacagcaggaggtgatgctgctcctcgtacttgatcactcttyggtccactcggactgtcccaaaccaggcccaggacaaaggagctgggttcttctgaccctcaaacaagtcccacggggacaccttctgcttcgtagagacctggagaccctgtgggaaaatagcgctctaagatagcacactcagatcttttccttattcataggccaggcttgtatgggacatggagtcagagaacactttggctggcatgagccctagagaacccgagaatacagcagagagggttacacagctacatcaccggagagcagtggctagaattcagacctttgtaagcccggttctacagttctttaaccacatgatgctctgtttaggcaacagaggcagtctagcatattttattgttaatgtgtatttcctctttttgctaaaaaaattctaaaaatttgttgctaaaaattctaacactgcaaagttaatcttactaaattataaccagttctaaatctctgtaatctatttataattttgaagataatatcaaatttaagagtcaagttatagtcaacctgtaattgggttagtattaacttcaatccaaatctgcatgaacttggttcaatatgtgggccctgtacttaataagccatactctgaatataatattattattagagaattaaattgtagcagcaggaataagtaaagtctttcaactcaagcttatatttactgactctagaaaaaaaaaaacggttaccctctttttattcttaacattaattggtgacatctcttggcacttgccttaaaatgtcaatttaaaaatatttttccttaaatggcccccaaataactactcagtcattccctaagatgtaagtgttactgttgttatctatacgcattcttttatgagtagcttcatctaaaactaaggttcaggccaggcacagtggctcgtgtctgtaatcccaacacttggtgaggctgaggcgggtgggatcacctgaggtaaggactttgagaccagcctggccaacatggtgaaaccccgtctctactaagaatacaaaaaaaggctaggtgtggtggctcacacctgtaatctcagcaatttgggaggctgaggcaggtggatcacgaggtcaggagttcaagaccagcctggccaagatggtgaaactccgtctccactaaaaatacaaaaattagccaggcatgatggcaggcacctgtaatctcagctactcaggaggctgaggcagagaattgcttgaacccgggaggtggaggttgcagtgagccgagatcacgccactgcactccagcctgggtgacagagcaagactctgtcttgaaaaaaaaaaaaaaacaaagacaaaaacaaaaaaaaattagctgggcctggtggtgcatgtctgtaatcccaggtactcaggaggctgagacaggagaatcgtttgaacccgagagacagaggttgcagtgagcaaagatcgcactactgcactccagcctgggcgacagagcgagattccatctcaaaaaatataaataaacaaagtaaaacaaaataaaaccaaggttcaattgccacctgtaaattgactgtttcctaatatttgtcttgagatgagaactttttccttggtgtaaaaaccacacatccaaatggattccagatgtcttactaccaggaagtccgctgacactgcaaactcaaacttgaccatgactttagctttttttctttacacaaactggtattagattctcaggctactctaaattccctggtaaatctgattctttcatgtcttcatataaactctccctttatttgtaccacaattttccctacctcccagctaactcttaatccttcaaaatgactcgtgtcaattttcctggggaccctctattctatcccctaatactctctctgtaccatgtcacacaaatctcattacactgtaattgtctgtctacttcccccttgagggtaggaactctgtctttcatcttggtgattgtggaatgtcggtggttgcttactgttcattaaaagagtaactgaccaattttctcatattttagagaaccatctttaatatcttatataaaacaaatgtccattaaatactgcttgataggaatagagaatatcctaacaattaaaataatttttatttgaaatagcttactacaggaaggtttttttttttttttccccccccagagacagggtctcactttgttgcccaggctagggtgtagtggctattcacaggcatgagcctagcacattgcagccttaaactcctggcttcaagcaatcctcctgcctcagcctcccaagtagctggaactaaagacatgtgccaccatgctcagcttacaagaaatttttcattgataaatatattctgcttctaaatctgaagtataatcagaacttatttatgcaattttttttttacactaagcttttacttagttttctcttggtaggtttccaaaaatttacttaaattcagggaaacattttaagtcctttaaacatataaaacgtagatcttcaaagatatgacctctttatatgataatgccaatgactaagtacacttagaagacaagcatatgccttaaaaacatcaacagcaaaattcatatattttatatatcctatggtaagacaaaaaaaagtatttcatcttttgtaaataaatttatatataagaaaaaacattcactcttgcctgttttttatctatagagtcaaatccagcaattttgtttccttttgtgtcaatcaaggaacccataggttcacaagtgatgacatcacatgtctgtttcggcwaaggtagtaactgtcgaactttgtcaatactttctgatcgcttgtctcctagctctttctaaagaaaaaagagagagagagagagtgagaagtgggacagaaattacaatgaaggcaaaagttaaccagaaggaagttcccctatgaaacatttccctttttatagcttagcgcatgttctttaaccctgaacatgttctacaaggcagttccaaatagagcaatgagtgtttcatttcttctatttaagtagaaaatagaacacatacaaaggcactgttgttacacaacaaacatcatagtgctgaaatgacaaaaatccagggtagtgatcacaatcagaagacaggagctgcagaacagaacactttctcatgtccagggtcagattacaaggtaaccattgatttatttgattggtaaygcatcagatttatttggtttcttttttgcactgttttcttacaatttttttttaaaggagtctgttagtggtcggtcaaatgaatcgatttataaatttcaatgcagatggctattttttcaattacacgtgccagtccaagcatasagttatcctaaatctatctaatgttagtattctggttatatatttaacagtggatttctaaagttctttaaaaaattaaacatgttttataatgtaattgttttcaataaaaaataatcaaggttatgtgcatgtaacttctgggtactaataaggttaggtgaaacaaatagcaaataatcacattaaattaagttgaatacaattaataacatttaatgrgtaataaattaaaatgcactagataataaayccataaacaacttgagctcataatacaggctgatctcaaacttactttcagtttctttactaaattcatgtatgcacgcttgttctcttcagatcccccaggggatgcatttgataggtcagaggctaacgttccattgattaaaacacccagcatgtcaagaactgttgtgaataattcactaagaaagaaaataattattttcatcttaaagtgaaactgaaatacacttatttaactgagtatttttattcaaggcacagaatttttaatagcatccaagtaaataagatgtggcagaaatcrccatcagtayatcaaagcttataccatgcatacatgtagcaaaatcaatgtgaartgataaaaacatacttgttagtgtgcatgtcaacagttcctgaagtaatgatctgaaggagtagcagggcccagtctgtagtccactgggtgctcctctgcaccgtgtcaaacattcctcctacctagcagacaaaatacagtaagatatttgcattctgtaaaacagaaagaacaccccattgctttatgttatcaaattttgattgttttttatttaaaaaaacaagggatgctctagtttatagattaccttatcttttctcttttacctacatgtttatcactatttttagttctttcagcacagttcagtcattcaaacatyaactamaatgaagaagggacgtgagtatctgaatgtgggcaccaataaacttagctttcttttgttccaaatcttttatgatgtccagttttatgatgcaattatagttgaattaaacctgaataatgtcaaagtcatgtaatccaattatctgcatctttgtgtttgctgtacaattactattgaatctaagcctrctatcataataccatatggaaacatccactatcacagcagtggtgggcaggaggcttggcccgcacacctaccagttcacgtgytgggacaaggttagaaacaactgcaaaagtatcaggcaggccatcctccagaggggcctgcacttgggcctgcctgatgggaaaagaaaactcaaggaatgcacaatatgtgagacattttaaattyctataaaacttctctgtgggatttgtctttataatcaatttgatggaaagttggacaaaactttgagttaaaagactttttaaatggttttaagtaagtatagtagaagctaacacttataacagtcttctcagatttattcttagcacaaactgaagagaaggagagattcactggggtagaggtagagaaggcaaatctatgcttaaaatacctagcactgtctagatgtctgaccagacaggaaggaaagcagcaagggaaacagaaggctttagmaacagggaagtaattacagagagcaaagagtggaaggcctcaccttgtaatgcagactttgcacttaggagaagtggaaagctggaggtattttcacatgtaaatatgtttaatggagggaaaatactagaaatgtcacttaccaaatttaggcggagttgcaatgcttcgtgcatcatctgccgcgcttttatgtcatcttggtatcgttcttctctccagttacttaaaatctaagatccggaaaaaaactccccattaaagtttaatttttctctcatttaaagataaattgagctttatactgatagcaaaaaaccacttcttatctttaacaaattaacaaacaaagctaaataaaattttagctttcttcttcctccatgcagaaagaaatctggctatttatttgtgcatttgccgttctaggtggaggaagaaaatcttatataattatatagctagcctatgattaagtctgggaaaatgcttgagagggccatcaaattaagcattaataaaaacttttaaaatacattacctcattgatcttacgaagaaaaacactggagagagagaattacattttgcctcagtcctgttatatttctagggacttgctgaaccctagcaaatgtattattttgatgttttatagaagagaaggtctgctatcttatgtatgtgtcttccttgataaagagaacgcacggtactttgaaaaatatggcattgcagacatcagccaagtggctttatcagtttataaagtgggctgcttcttcacttcctcactgactcacactaatgctggaaaaggaaaaatttgcttaggaaagggagccacaagtgggcaacaccctaaaatcagatgagatgagcaaaaaaaaagtgcaattcaaaacaaaaacaaaaaaccactaacaaaaaccctatcatgctctgaaatatggtcattaatgagagtcatcttaaaagagttcaaatgagtcacatgcagaagtactccatcccaacagatgacctgtaagtaccctgcaaggtgagaggaaagcacttcccaaatctcatcagaagaaatgaacccctccctaaggctggcttaagggggcaaggtagttaactaaacaacaagctctcatggagctcaaataatagtagtgggacaaataaaactaagtgtaacaagtggtttgaggcatggcaatggcatacagaatggctgtggtcctatttttagaggtgatcaaaggcctcccgaaggaggtaacatcttaacagagaactgaatgaagggagcaggccatgctaatctctggaagggaatctttccacctaaagggaagaaaagatgcacaggcactgaaatgagaatttgctcagcaagttcaagaacagtaacatggccagtgcaacaaccatggaggaaagagggccatgactggtaggagacaaggtaggagagagagccagtgtcaaatcatgtctggccttatcagcccgaattttttatactaggtatactgaggtaatatgtgacttccatttaaaaaggttcactatgattgctatatctagatctctcctacccaaaaggtgagaaatgacaagaggatcaaataagattaagtgtccttgtccatgtccatctagtaccattcgagggaaagacatggtgtcatagaaacacagtgccacaagaaggggtcaattaggctgtgtatcaggataaaacacctcataagaccaatctatccactttgcttaattccatgctctccaatttctgttgtgaatgctcagtttccttatagtacatagatgcaagagcctcaaacagtgaccaggagaactgtgtttggtgaaaaggcaatgtccaaattatttctaaataaaccaacatgccttctgatttatttcttgtgtacttggttggcatcaatacaactgagtttctgaacctacagatttcaagctgaaagcgtgcctgataatgtggcatccaagcttgaggagctggactcactgccatgcctactgcagcatagattgctccaggtcctctcctatgaggcagagttaggagacgggcagatagttcaaagttatatgcaatatataaaattttacttttataggcagtacacatttattgtayatatctcattaatataaagttgttaatcttgtggtgtctacaatgccaggtagaagaataaggcatggattgtttctcagcgtctactcaaaacattttgtaaccttactagttgttttttttttttttttttgagacagagtttcactattgtttcccaggctggtgtgcaatggcgcgatctcagctcactgcagcctctgcctcccaggttcaagcaattctcctgccttggcctcccgagtagctgggatcataggcgcacaccatcatgcccggctaatttttgtatttttagtacagacggggtttcaccatgttggccaggctggtctcgaactcctggcctcaggtgatccaccagcctccgcctcccaaagtgctgggattacaggcatgagccaccacacctggcccttattaatttaatctcagtatttgaaaggcaaataaatgaatgccgttagaaagatatttgcctgtcttaatattatactatactttacctggttaacttgattctggagagatgttaggaggccttccctttgttcatcttgtcccttaaggcaggtaagtaccagtgagaggaagggttgttgactcaaaagagacatactacaaaggaagtaataataacaacagatctagttagaaataatgcattacttcctctggcaacattcatttctttgcctcactattagataaayaagagaggtggtaaatagccaaagactgcttgaaaatttaaatcatacctctacttataaaattaaaagccactgtaatgcttctaaatcacttcgtatgctctaattgccctcgaagccattctcaaactagcatcaawccatactgcatgtgagcatgccgggcagtgagggtagaagacagtgaattcatcttctacatcaatatgcagaatttaaaaatgtacatcagaaagaatatcaatttatacacaggataaaattaaaaatttttaaagttctcatataaaactcttgttttagagtctgggaaaacaggcctatatatatgtctgttgagcttgttttggggtttgattttgtttttcagcacatttcccaagaccaaaaagcagggtgttagtagagctaattcatcagccagggctgaggactccaaaaacagtgtacttgctggcgacccctagtgtgcagctccaacacagcccacaggctccaacatagcccgcagcatccactggtaaagaggtgtcaaggcatttggttaaaaattctgttttaaattggcattttaacaaaatgtcttcaattagagaataatcaacaaatcatattgacaaacaaagcgccatgttggaaagacaaatttcttaaaatgagacctaggccaaaatatttcaatcagcattattctccatgggcagaataaagagcccctgatgtgggaagagcgatctttcaagtctcttcaataccatctgtcctgcctatgggaagttaggcaatgcacatacactcacctatcagcaaatatgatttgaaaattagaattatgcttccttgttggttaattaatcctggccaacatggtaaaacaaccagatgtaaaacaaatacagtacatacaatgctgggtctctaccaaaatgtactgtagttaagagcacaagctcagaagccagacctcctggatttaaacccaggctttatgtccttcactgtgtgtcctggagcaactcatgtaacctttaagtgtctgtttcaacatgatataaagaagataatgagagtacctaccacatgattgctataagaattttaaaagctcatgtacataatgagttttagagaggagttgccattctgtaagcagtcaataaatggtggctactatagtattattcattagtggacaagaaatctatgtgcttaaaatatttttttaatggaagaaattatcaatttttttcctttactcctaggtttcttggcattttcacattagggtgaggtttctttctttctcagtaacacggttttcaaatataattacttgaaaccttttcttgggcataaaataaattaagaaaacattagttgtggtggccgaggagtcttaatgtctagtctagaacaggagccctaaatgttaaaaatatgagcaactagttcagacaccaacatgccagaattatacattatatttattttaaacataaatatctaaataataaaaaaatagaaataattaaaaataaaatacagggatcaggtagctatccagatctgattcagttggtctaaagcgggtctcggaaatcactgtttttaacagttcagcagtgatttggatataaaggcwgaattgagaactaatgtattaaggattataacctgaaattttttaggaataagacagccttgcctaatagaatattcccagttccatttaaaaactaaatttcagtggactgtgggtacagtgaccacacaggtttacaggaagtgagactttctcaattattctttaaactctcacacagacgcccatcttccagccacaccttttctgtttctgtctgtccctttcctttttggaagaagaacccaagtgctgtcccttctccagctcttccccagcggctttcagcactcttccttgcacagaagttggcaacctggcgatgaggggggccaccaaccatacacccctgcgttcggaggaactaaaatcagaaacaggtgttacaccggagaaagcatcctttcccctgctctcacagttataacagaaactccaaagcgaaactttgatgtatgagacacacagactgttctaaaatttcccttttatttctgtattatctttcctttttccgaacactagacatttgcatgagctttccacctaagcctacagaaagcaataaaacatgcagttctggaaggatattgtaactaaactgactttaatgttttccgatgaccccctctctctaattaaaaacaatcactttgtccaacaaacaatatacttttctgtcacagttacaatatgaaatattatatgtaagcatactaatagctaatttttaaggtttaaaattcgctagttatactttayaccaaaatgatgaaatacaaatcagcctttcatgattaaataattactttaagactttatatgcctactggttctaattctgcacaaaaattaccaggatatatttgtgcaaaataattaattaataaaaatggtggaaaaagcgtttcccatataatgaatactacgtaacacagtagactaagggacactgaaagcatgaaccaaacctgagttcacctgcagtttcaaggtgtttaagcctactcaatcaaatattccgaagctatcattcaccccagctttactmattaacttattaataataayccctgcttacaagtaactatgttcttcacattcctatgacttaaagaaaaatcactgtgctacacaaaatttaccgttacttgtgaaaaattcatgayagttcaataaaacaacagacaaaaataccttaggaatgtctttattccattctgtctcgtgctacttgtatcagcacttccaatactgtttgggttgaagaggctcatgccagaattagaagaattatttaggtctgcagactgctggaatacctctattgttgcctttgcaatattgtccagtaagttgttcatttcggccacagaaccagagccctagagttagatataagaatactggcacatatgtgtattcctttatcctcaaacatcaacgtgtttttgctttttataaaatttcatacagagataagctttcaatataaactcacagggtccttcaagcactgtttgatcattagctggagttctaaccaggattgcctcagtgtccactgctcaagattctgggaaaaatggaaagaattaaaacattatgggtatcaaatgtgttaaaatacagtaatttcttacagtactccttctctcaagaaagagcagaataatcatacacaatgaaataatttatatgagtcaaaaggttcccaatcttgctgcatatatattcagtagcgatacaaaccaataaacagaaacattaattattaattagttaatactgtgcctgactcagctatgcactgaaactaaataagcatttctcctttcaaaatctatttaaccaatcccaatccaaaatgatttcaatatttctttaataatatatttaacatagcccctctctgaagcatatttctcatgtaaatacaatactgatttaaaatatcaatatttgtttgatgatcatatacaatttgcagcatgtacatccacccaaaaataaagtatgtcaattccacagaaaatgtgtgggaataaaaatcagaattgaaatcacaaattagcaaggacaaaaaaagagaggaagtaactctttttattattacgaagaatttatcaaatgacagaaacacaatctgtatacgactgacctgaagaatacgcttaatgtgctgtctttgcagattgtccccctcggtacattctttaatgccatgaggataacagataagctgcagtaatttctgtgcttgcatatttgaaagcacagggtccaatataagttctttgtctgtacataatctttcaggttcttttaagcaatgctctcctacccattcctaaaaataatatggcaattasattgacaggcactggctttcggtatatatatatgcaatatgtactaaatccacagtgcataattgaatagaaaactgataggaattttccaatttaaaaaattacattaaaaagtaggtagaaaaattttaaaaaacaaaatttttagcattttggcttctaaaaaatacaaagtagaacttgcttaaaaacattttttaatgggaaaaaagaaaagacaataaagagaatattagtatgtttttaactggaaagtaaggtcttgctctaggcactattttgtgtcagttttttctaacttgctatataatgattctatcagatatacgttcttcataatttttatggaatacattgtactatctcactgactagatacaacatagtataacaaatatttagaaaacgatcttcctttttgatactattatgaataatgttatcattataaatgagtagtagtgcacatctcttttttatacaataattttcttagggtaatttcatagaagtgcaattgctgggtccagtgtgagtggggggctatagatgcatggggttaatgaccctctgaagagtttctaccaatttaaactcctattgccttttctttaccatttttttcaaaggcaaattattatactaaataaagtaagaaatcatcaacagtaacagagcccaatttgaacccagatctatttcgggtgaagtctgttttttaaccaccataccagtggctcaatgctggttgcccactaaaattacctgggatctttataaaattccatgcccagggcccacatcagactaattaagtcaaactcaggtggtggcacccaaatatcagtaattttttaggcatccaaattgttttaaatgccccagctgattccaatatgcactcacagttgggaaccaacacacaattgcctctcaatacttatatgactatgtagctatcttttaccatagttataacatgcctgtaaaaatacaaaaacatgacccagtcggtatgacacctatagcaaagtacaaaataatatataaggtatgtcactttttttttataagagaacttttaaaacaaatatatgggagggagaataaaccaaaaaataataaaactggatcatctggtaagagggatatgggagggagacacatctctgagtatacttttttgtatagtttcacttttgaaagtaagctattctatagccagagctggggacaagaaaggaatttaaataatgcaaaaccaaatgaacctagttctatttcacataaagaatacactcatagggatgggaaaagttcaaataatttttgaacacagtattttaaacccttagagaaaatggaattgcaaacaaatcttcaaagccttttaggtaggtttgttcttcctagtggtatgtgtgtaacayttctttctttctttctttctttctttgagacagagtcttgctctcttaccagggctggagtgcagtggcgcaatctcggctcactgcaacctccgcctcccagtttcaagcgattctcatgcctcagcctcccaagtagctgggatgacaggcatgtgccaccacacctggctaatttttgtatttttagtagagatggggtttcaccatgttggccaggctggtctcaaactcctggcctcaagtgatccacctgcctcagcctcccaaagtgctgggattacaggcttgagccgctgcgccctagcctagtgtacatttttgatactgtattttaattaatcattttttgacaaagcgctggatagcacatttaacatgcccggccatgtgtaacattttaaaactatttcagatgtatcatagaattaaacaaacaagtaaattgacgtttttgggaatcagcattcttactagggaagaaggtgatactaatatgaattaggggaaaacacagaacaactttgtggggttggattggaattgaaggtatcagtaggacctcataaatatatatatttacatatatttaagtgtatggatatatttttctttctagctttgtctgcagacaggtcgtagaattaatgatactccataaccatgagcatacataatacccagatcttggtttctcagtaacgttctctgctaaatagaaccaagggctccttggaggaatagttgattccaggcccggggcagagaaagtacaacatgggccagaaactatgaaaataccaactatttttaaaatgtcaaatgatgtgataggatgaatagattcctactgcacaaatctgggacagtctgaacatgaaaataactaagtacagtatattataacccatatggataataaataaacaggggagaggagggcaggctcttccttaaaataggacacaaactgatattatgaagggagaggagaagttggggaaaaaaaaaaaccaccattttgcaaccatcatagtaaagactagactgggcaagaatgaaaatgaatgcttatgaggggtgggggagttaaacaaggagaagaaaatttgcactgtctcgaagtatctcctcaaagattgcttactgcaaggggaaaattagtaactacacagtccccactgtatagttactaatcttgaaactatacaatggaaacatcttaatcaaaattaacatcacccttgaggtgcaaatggacatcacatgccttcagacatgattacctgaaagaactcaagattatttctgtagtatcttggccagggatgcataatctgaagctaatctacaggaaacctcagacaaatccaacaatactgggacaattaataaaatygaactgtggcctatagatgagaaaaaattactgtaccaaaagctaaattttctgatgtttaatagctatattttggttatgttatgaaataatgcaataktcaaaagaataaaatatacaatctactcttaaatgattcagaaaaaataggtatatgcacccacatctccacatacaaattacaaagcacatgtagcaaaatgtaaaaattagtaaatccgtgtaaaggatggacatgagttttttaaaaataattcttgcaacttttcagcaaacttaaaattatttcgaaataaagtgagcaagaaaaaaaggcccacctatgcacaagtttcctataagtgtaagtagctctctccaaaagaagagttacgtactcaaagtaaaaggcaaattaaattagaatacctgttgacagatagtcctcagtacatatctagcgtattctcttaaattggcagtttctatggaaatgcttttcccacaggattttggattttgtgaggcagtccagatatcatcagcattcccatcacatygcaaacctctcatggtgaagtcatcattctttaaagagctgacactgttattgccaattttggcatctcctaagtaatagaatcacaaaagcaaaatcacagaagttcaaaatattgccaaataattgaggagcaaatgaggatagcattcagggatttaaaatatatgaacagtattattattgaatagccagttgttcaggaatagagagaatggatcaagagcataaatgcatgaacccagagaagtttctaacagaaatggagaaaaagcaagttcaagactcggtccttattttgtttgtataattatagtttcaccaaacttggaaaggccattatgaatcacactaagtaatcagagaacattggtttcaccaatatttcaagcatgaatgtattcaaattcatttgacttatagacaaggaaaaaatgggttactcacccttctagatgtcccttttccatttcttctcttacaatgacttattttctatccataggtcaagagaaaagttttgccttagcccaccttactatcaacttcttgacaagagagatttatttccctgggaatggaaaagggcaatgcatactaaggaagccctgaaaagtagggcattcattgaataacccctgtttttttaccttcctctctgtaacatacaaattagaaaaccttacctgataaatctttagtatacttagtgaaatgaagctaaggaaagtgttttcttcataacaaagttctgggaaagaaactaaacagaatgtctgaatagctagaaataagaaaactctagccatgagagacaaataactatcatattttaaaagtgagagagtaataaaaattcaaaataaggattgccaaatgacagcacagccttcaaacttttgccttttactcacaggatcataggccttgacaagaaaatttcctggaaccaacaaatgcttttacagtaggccttcactgcttgcagcaagtgggcaaaacaatgcccaagttaatggaaaaagccttttaaaacccacaagtcaaccaagaaaaagttttgactttgctgaaaaaaatggcttamtgagtatttactaacaaaatcttaagcagaggagaggaataaataatgtatttcaatttatcaatatataatcatatgtttctcattaaaatacaaacacaaagagtaccagcttcactttacccacaggatttcatttaatagatcacttcaggagctgaaagaaaagactaaattctgcaagtaccaaaatgtagtatgctttcactaccgttaggtgatgtaaacaactacctctataccttgagttacattgtagaaattaaaaaccaaatttgatataatggtcccatctccctaactcaaaatatatcctggtggataggaattgagagttggttagggcatggtagggtggataaattagagcttctgcaaataagaaaagagaagaaaggaaaagaaaagaaagagaaaaaacagtacctgctagccccatactaggagatcctcatttagtttagatgttaggacaacagagaaggtatgagagtctgtgccaggccttctgcaattgcattgacaatagaatacatttgagcgttcagtgcccacctggctcaaagctctgctgacgttaaactgacctgatcctgacttcttagacccagggaatcctccaaattatgtggatgaagaggtgggcaaattctacttgagattagactaatcctacaaatcatggggccagtgtctagaaggtactcatcttggtttctgccattagcatatttgtcatttatagattcacacttccaacataattttattgaaaactgattctttgctagcttctctgatgagcactagaaataccacaggtaaaaaagccagtccctatctctatggtccctacatttatttattaagtagaaccgaccaactgaccttcccttcaaatatgatcacagtagggaaattctactcactgaaatgagcacttaatgttggctgtataaatctataagcgcctacactcagaggaggctgtggtccttgacgtggctctacctcccctttttactacaaaattcacaggcccgtgtgtgtatcctttcttaaggtgaagttttaatagcttgttttatgaaaattctgttatccttcctcatcatcaccaaataacatttccaaagcagagcaagattatagcccaaaacatgttatttaggactcatctaaagcaattcctatccactcagtaatttctgttctaatgaaggggagctacttctgaacataagagtcaagaccaaaagaaggtacccaaagttggaattaggcagtctgacttgaagacttcctaatcattcaaagcctttaagatttacagaataatgttttaatgtattaccctgtaaatgaagagaaaaggcagtgctattattccaggaaaattcttacaaataaggatgtaaagaacatcttggacattatgaattaaatgaaaaaaattattgtgaaacttaatattgatttatcaataatatcaacatcattgcaactattgcctgggtcatcaaaaaacaaaggtagaaggaaatatactcgttcagggtcatgataggagcaaaaatactaagattaagactcagattttctggtgttctgctcctgaaatataatctggataaaatgtaaacatttagttagattaccaagtcatccctgtctctcacaaagtgtgatttctgccaccagagaaggcaaaacaaccctgtgggtctgaggacctattttacatcagaatgagacattatgcaactaaaataccataaaaaatattacatgtaagttcccccagagacactagataagggacaggatcttccagagtctgatgtatttggtctaggagaaaccactaatttttccaggagaataagcgatcaaacagtatcatgtttccaataatactactagatttaaacctgaaaataaattattttgccttcatttctggtgattaaccaagaagcttagggtcagaataatcttaccaagcatcataattgcttttaagacagcaaacacggctcccacttcaatgctgttgtgagcagcggctaagaggtgtctatcacaagatgatcttattccagggaaaggtttgcctacaaaaacaacaaatctttaatagtctcattaccatcattagyaatgttttgtaattatttacaggcagtcagcctttcattgtyagactgtgggtgcttaattgccattagcttgctttaattgatgcttcatggattcactaagaaacatggccagtattcctcacttatccttttctttttatttattaaaacaatgtcgttcctcctcagagagctacatcaacaagattagtaggaccttcacatatttgtgttgattctcacacagacacatgcctatctatatggaaatgatctttaggagcagacttcaccaacgcccctaaaattcttactttattccttttacttagtacaagaataaatgagggatgggtgcggtggctcacgcctgtaatcccagcactttgggaggccgaggcaggtggatcacgaggtcaggagttcaagaccagtctggccaacacagtgaaatccccatctctactaaaaatacaaaaatttgccaggcatggtggtgcatgcctatagtcccagctacttgagaggctgaggcaagagaattgcctaagcccgggaggcagaggttgcagtgagccgagatcacaccactgtactccagcctgggtgacacagtaagactttgtcttggaaaaaaaaaaaaaaaaatgaaatgacatgaaatgaaatgaaatgaaatgaaatgaaatgaaatgaaatgaaatgaaatgaaatgaaataaaatgaaatgacatgaaatgaaatgaaatgaaatgaaatgaaatgaaatgaaatgaaataaaataaaataaaataaaataaaataaaataaaataaaataaatcaccattgccctaagctgctgtgatgtggttcagaaccaacacacacagtacgtgagaggaccatgctgcccaccagcatggcttggcctaagagcagaggtatttttattgcttactaactcttgattcgtatttctcaatatatcctgatattacacagataaaaggtgctgacagccctctcaatgaatagtatcatctcacccttcatcacccccagggcatgcccaaaaaattaagaaggcaattacagaaagggacagcctatttggtcattttagaaactttagctaccaatgaaaaggtaatcagatttttctgcagtcagctcacccgttgcttgaggtaagaagcaggcctggggagctcggaagagatgaagcaagagtcggcatgtcattctcgccccaggctcggcgtcsgcatccccacaagctaggaaagggggattggaaaagcaagttttctaacacacttgggaacaagtccttcaggtttcctattaagctaaatttcctggaataattatttaaataaattttccttatggtaagaaaataaggccctggctatttttctgagaaatcttggtgcttccttaaaacagactgtaacatagcagtttcccacmtttttcacggtgatacatgttaatttgtataaaataactattaaaattctaccatatctaccttgatactacaccacttcccaatatacataccctcaaatactcctttccctgtgttgtaatgttagaaaccactccatcaagacaacaatcaaagagcaackgatgttcatggatgctgccttacctgctgctagaagagagggaagtgcgacatgctgcacgacgtcctccagggaaaaacactgtcgtgctatcagaatagcaatgaaagtagctaatgaatcatggaatgaaaggtcactcaccttcaagaaaaacattgacaggttttaatacctaacaaccttgtaagcagtatctaagattaataactaasagaatgcaggcaataccaataagatctcaaatcccaacatgaaccagcagagggaaatgataacatatcatgatgattatcctctaggcctatttctattttataaaacaatgaatgangtttacccacattccaatgctgtaagaaaatactgagctttgacttgcatacatgcaaatgaaaaacamaacaacaaaaatggaaaatcaggaaatcactacaagatgtaacatcattaaaacattttggcagactgcaacaagatataccatttaagagtcagacaattagaaggcagggaaaaaccaggaggctccccctagttgaaaaacaagcctcactaargttttggagttcctttcagtggtaactactaargattctttaatgattaaactcgttttaaaaacaactctgaaagtttccaattgactcttaaatttaaaaagaagaaaaagagacagagggggaaattaattcagtcacagtgaaatctttacctttctagatctcacgtgaccttggcagaaaataataagaaaaacaactacaatagcaatcttcatactgattcgcaccatatgccaaggactatggttaacttgcaaaaatcaccttatttattagcacaccaccataaggttcacactattattaattccaattttttagatgaggaattgcagaaggtaaagtgtaatttaaaaaaacaactaagagattaagaaactatattaaagataaaaatttaagtctcttctgtccagaaaagcaggccacatctatgaattttatatacataaattcttaagtcttcatataatgaagatatagagataggattatccaaccagtcctgattagcagaattcagaagtcaaccttcaactgagaggcaggtgtaaaratgtataaagaactatgcataagagatactagtgtacgacaaagrctactccaataagtggcaacaggagaagtaaagaatcaagacagatttttaaagaaatacacacatcatggatgcaacatgntatccaaggaastcagtgatatatacaaggggtatcttttcatcatcttccaggcattaattgccaaaaaacaccggacatcctcggaatctagacctggacattcttatgtaacccaacaaagcctttatttgtatactgcgccttgcacttaaaaatatcaaagtggccttcttcagaatgtgaactgctttagttagattatgtcccatgctgtgaggaatccagggcagttggtaaaaagaaaaaacagctctgaagagaccatccatatggaagaaatctcaactaaatggaaatttcaggaaacaaagaaattcttggcccctctgctacagattaaactatgcattctatttatttctattttttttcatgtatttaatccctggcaatgtcattgtggtttactgcttttggacagagaaagaaaaaatattttataacatttcagttgaatcaattaaataaaagccaaaagcaaaaagattacccactaactaaatatttaattgcacagttcaatttttaaatgaaaaagaaaacttacatctacagtgcaaagtacatcattaaacccccacacgtgatttgaagaacaacaaagagccttcagaacccccagccattctgaactaagaacagtgcagcaagccgtaagctcagaggagaaattggctatgtcgttaatcctagaaaagaaaaagaagacacagaaagtaaccttgtacaaaagagaaatactcacctgtgatatacttaattaacatatatttcactaacatcaaacaagtcattttcttagattcacagataaaatactcatttgtcaaataacttagtagaaccttgagaagaagataacaatggcttcaaatatttktgacaatgctgttaagcaacaaacaataatcagtacatacacgaattagaatatttttagtttcgtgaataaatctgagctacgatttacatttttaagggcatcaaaaaatttatagacatcatgtaatttaggtggacccaaatacggtttttttcaaaatacaggcattcttatttatatttttattatatgtttttgaaaataaatcatgtaattgttggccatattgaaaacatctcatgccagagtaataaataagaaagcactgtctctcaggttaaggaaattaaaagatagtgcagaggtaaattaaggaataaaagaagatttagaaaaagcaaatgatagccaaatgtgagtccagacacttactaacracatcaatttcaaagaagcaccaaggcaacaactctttggttaatcatgaattccagggtaacccatctcacctgccagcatcctgatggcccatacatacattcatgagtgtattgcagacaaagctgtagcgattggccgcrttgtcactgaggatcttgcccagcattgagtagttgatgctgcgggctgagggattctcaataaaatccatcatgaagtctggatcccatcgcaagttcgaatttgcaggcatcacgttattatatatggtttgctttacttttgaacaggcactactgaggttataagaaaaaaagttaaaacagaaaaataaaactagaataactagaaaactatttcacttaaggacatattaaatggcaggaactgtaatgcattcctagagaagattcacattatgagttcttaattwgaacttcttactaattggcgctaatcaaagtactttggaatgtagaaattcctcaataaataatttctaaataggtggaagaacaaaacagaaatgaagtatttggttataaatcttaattatttcctaaatatggtctacattttacatgctttaaaaatcaaagaaattactatggcttccaacaactgtgtcttaacagttgttgaaaagtgttattacttaaaaataaaaaaagattcaattacacataagagtactcttaattacatatcttacaaaactatttctctggtatagtgtacgcagtagaagttcgtgtgccaagactattctggagactatggcacagctgtgaaaaagagaggcacattccttgtcttcaatgaacttacattctagtaaggggatatggataatacacaaattctatggaagtgaaaaaactattatatcattcataaaaacttatcatgttgtatttctcagaggcattaagagatttttaaagagcctgctctatcatataaaaacagctcatgtttcagtgagttacgtctgaatcagatatagactactagaagtataacaggaattagaacctatctcctccaaacctgctctgtgaatgagactggcagaaagatttgatgtaaaatctcagattctatataaacttagccatttgtgcttaccttctgtaggtagcatatccataaacaacattcactctctctactcaaaagctcttttatgcatcagaaagtctgttttatagattaagtttttggcagcaaaagtatttgtggtttgtggtgacctatggctttttttttaaaccccatattgttatatacttgcatcaatggcagccaggaatgagtccctcgaagatgaaaagtcacaaagactctctattctaaactattgccactgtcaatagctttaagaaaacagagattgttcagttcaatgtttaccaaaatgtagtttcagctctattccttgagaatcacttttggggtgtttgttaaaaatatagaatcctgggcctccactgtgggtgtatagagtccgtatgtgtaacaagatctcccacataaatcaagtgccaagtaatgcttgggaagcactactctaacaaagaggactaaagtcatctactaaatggcagcaattacaatcttctacactctctttctgtgtagacaacttatrttttaaaaaatgtgttggttgtcattgaaggatacaagtttgcaattcagagtcatgacattttcagtttcttgaggttgatgtgagaaataaagctcttgatggaaataacccagcacagtgcttggcacacagcagtagctcaatcagtggtagaggtgaccagtgttgtatctcccccaaatactcctctcacacaactgtgtgaatggtgtttcagaaaaaaatactcctctcacacaactttatgaatggtggttcagataaaattattaaagttgttttatcagcatactgatagaaatctctctgtgtatccagcttttgtttgcccatttttcttcatctcaaactacaaataggtctctgacttcaagatatcccaagaaagttgtatttctctttcattttttcaaatagaggaaactttagacagtgccaatcactatgatgtgccactctgctgacccctgagtaattactctattcactgtgtgctggtaccctaaatttccacacaccccacgcccagcgcatgttacttgaattacctcatttaacctatttgcaccacactgcaggagtattaagggtcaaataggctactggggctgtctgaggaagttcactattaaaaaaacggctgctgtaagaactaaatcatgtaagagaaagctctttgaaaaatgtaagctgaaatggaaagctctatgtaaagtaagagaagaatgttaagtatttttaaattgtgacacaatttctgtggaaagatatttcctaagacccactcaaatatttcacaaaggattattttgaaacctaacccatttcatattttcacactttattaataccattaaaaacatgaattgtcttagatataactatcattcaacagatttttttttcagtgcctactaagagccacatactcttcaagacactgggatgtagcagtgaaaaaaatagaaaaagcttctgctgtcatgaagcatrcattctaaggaggagccaggccataaataaatatagaatctacagtgggggtagcaagtgctgaggctcagaatgatgacatgggggtgctatttaaaatggtgtgctcagggagacagtcgtgagtgaagtgtgggagtggggcacacaagtaactgaggacaagtatcacaagcaacgtaagataaagtgcaaaagccctactgtgggttgttcttagagtgtttgatcagtaaagaggtctgtgtggccacaataaacagagggaaaggggtggaagagaagatgggaccctgcagatcttgaaggctaggtagggatggtgaattttattctgagtgggtgnaaaatcactgaaagcctgtgaatcattcgtatattaaaaggwtcactttagtggatgttgaaaatgtgttttagagttaagggtggaagcaaggaaaccagttagaagaactctgcaatggtccaagcagaggtatccacagcggtaaagagagggtgaagaatgggcaggttctagagatgcttggaaggcagagatcacagaatttacaaactggatacgaggtatgacaaaggaaaaaaaatggtagttgaacatcctttccctacctccttctggattccaaatttgttttcttagctattaccttctaccactctcctcctacccatctatagtaaataattgtcctcaaaataacattaaataagcatttactttccagccctagtgctgcctgtgggggtagcaagtgctaagatacaacgaatgacaggaagttggggatgctatttgaagtaggaatggccatggaagcagaaagacaaacggagtgaagaagtcagcatgcaaatagctctgaaagaatgttctgagtggggtgatttcaagagcaaagcacagaatattgtctctcacacttacagtaatttgtaataaaggttatagctacagccaaaaataattcaatacgaattctggataagagtattaagaaaataaaaatatttataaaaatacaactttctggactcattaaacaataaaatattccttcagcaataagatgtattgacaggaatcaaatactactatcattatcaggtcatgaattttaagtctaagatagcaagtaggttaactgcagaatttacagtacctttttatgattaattcagttctatttttttcataccaggaaacattagatagcatttatcaagctgaacctgaatctaatacaatctgtaatagaaaccaggtttcctacttttaatgcacattgatttaatgttattcagtgagggtactrgtcattttaaaaaaactcattaacacatgaaaaagttacctgctaaacagcaaaaytgtttttgtgaaaaaagaggaaaagtaaacacagtctgaaaaagttctagaaaagtgaatggggctatagaaccttctatgagtcaccaggaaataaaaaatgaaacactgtaatgcccaaaggatattaaagctaatccaagtaatgcaaaaagtcagctcagaaaaggtagatatcaaaatcaagagggatacaaataaagcaaaatacaaagagctgcctcattgatctttctattagatttataatccaaattgaattttaaacttaaaatggaaagatatatcaaataatcattacttcagtaggacttacttaaaatgcactgtctgtacaacatatagaaaatgtaaaatcttaagaaatactttatttattgaagaaataaaatcagacctaacatcatttcaatattgggggaaaaaaaacctatgatcacacatttacattgtgtaatagactatcgtgtattgtccctgtctattttaatattcagtttaaacaaatcatgagtatatcaaaattactgcctaatagatacaattgcaattagctttcattattcaaaaggatgacaatattgtcagggtcactaacaaacataggcatgatcctatttctgtccttttgagtctcttctactcacctgaagaggtctccaaatttacttctgaggtggctacatgacacatagagatcatagaggtaggctaaaatgcatctttcaggggaagaacattctgaggggtttacgacatgcttgaccacaccacacaacctgaggagaaaaatatacgaagaaataagacatagatttgtactaygtgggttatcatttgactcttttagaatgaaaatatgtatcacttgggtaagaaaaaggatattggattgttgaaactaataaatagaatagtaaataactcagtacaatataatttttctattatgacactgaaatagattttaaaaaaaacttcagaaatgtcactgatgacaagaaacaaaagcaakgaaagaaattccttcataaagaaggtacgtatggaggaatccaccgattaagttgctgggactgagacacaaaaggaaaactgttgtagagagcccctgcctccgcagattcacaaattccatcagcgtgcaaagattcccaagttttctcctttgtaaaggagcaatgcttcaaagcagtcaatctggaaaacccattttcaagtgcataagcagttcatggtttggagtcacattccccttatgcatgtatacattcccctatgtataccaactagtaataaatttattttagtttatcttatataagaagataaagccccttctgttttgtaatattctgtataactcctgtagttataggcctctttgtccacagtccatacaacacagaagtccatacaccacagctgtaaacacttgtggtccattcacctatctgtgcatctgattccatcaccatcttgtattttgttacagggctcagccattatattacactaacggagtcacagatgacagattattaaagaygaaaaaagctttagaaactatctgattcaccatccttattgtataaaggaggctctgagaggcagaaaggtggggtgacttgctcaaaggcaaagagctagttctagcagaagcaagacaacagcttaggtttccagactcccagatcaaactcctctgtactattcaggggaaagggcaaagtggagagaacataggatgtctaggccaaggaggacaatggaatcacagrtaccataggtggaaccaaggagacttcttgaggaaatggcaatgtagtatcccaaaccctgtgaaatgacatcaacagatgggactacctagcagcaggtaaaagctgccaattagaacaaaagtgtcacacaattaagaagaaaagtaatgattcaacctgttaactatataaacaagcaaaccaaaaactatgcagccataaaaaagaacaaaatcatgctctttgcagcaatatagatgtagctgcaggccattatcctaagcaaactaatgcagaaacagaaagccaagcacatattctcactgtaagtgggagctaagcatgaggtacacgtggacataaggatgagaacaacagacactggggactactgaagtggggagacagagagcagaggaaaggtctgcaaaactacctactgagtactatgctcacttcctgatggtttcaatcataacctgaaacctcagcaccaagcaatatacctttgtaataaacctgtaataaatctgytctaaaataaaagttaaacaaaatcctgatattatctataaagcgaaaaattattttgtgactaaagtaaataaacatttattcagagtctgttaggtttaggtatccatcgtatagtagtcagtgtttcctcaacttctttgatttgcaagcaataagaaaaacatttcacatcgtaatccagtgtactgttcacrtaagtacgaagaagtgaaataatagttttaagcataatacttayccttactaatataaggtaaaaatacaacaaagttaatgtcaaatatgattttatgaatatttaacaggataaaaattttcaaggccaaactaaatgatactgaaatcaatttcaaaataacaatattaaaaacaaaaaacaaaaacaaaaaaacttgtcacaacccattaaattcatttcatgaccaactaatgggtttcaatatactattttaaaagtagaacatagattaaacagcatgaataagcttccagttcgaaagatttttattaaaatctgtgagatttattagctatgtgatatagggtacatcacttcaccaaacacttaacaggcctgaatctcaatttcctgggctgtaaaataatactaaattcaaactttatacagtagttgagttattaaataattctctatttcctgaattctaatatgtaaatattcttacattctgatgtttttaggatgtttcagatttcatttcataacatgtaattaatacaaataaaggtagcatttcctctttcccagaakagctactgttaaattgatatcattctaggatagcatataaattgattacatgtgctagattaaaaaaataaaaggtactataaaaccaaagaaccccatgattcttttgagctcagaaggaaaaactgaagagaaagaaataacaggttgtctttctgtgtttaaataaaaagccctggagagtggataaaaagcagcttatgtaagtttttgagagctcatttacactaatttggtgccttagcctcagtctttaatgggggtggtattagctaattctgtagctcaacttcattagtagagtaagccccagcctacaactgaaaatgaagtaatttgttctaggttaattcttatcaaaagatatctttaatcaaagaaatgcaattgaagaaccaaatttctaagatgataatgtatgcaaagcttatttgatgttgagtctgcaaacataaactgaaattacatgaataaagaagttacagcattcactattcataatatgccaggatgctggccaacattaaccgtagagtgctataaatgactagctttgtacttagaaaccagggagagggaagaaaggcaaggaggaagggaagaaggaatcacacattattagaaagaacatactttacatgcttagacctttttgatcgatgttttctggcaagagtgttctttaaccatgttttaactaaaacaggtatcagtactatttttcttttaaagccactataatatttcatcactagttatacattctgagattggaaaaacaacaatgacatgctatataccaacccttcaaacacstgggctgtctgatcaggattcaagattagacaactgtgatagcgcctgagaacagccacgatgcagacacacagtcctgttgtataacttcctgccaggctggaggattttaggagcagttcagcttccacaacactcagttcatttagtaactgtaacaggagaaaagactgaataaacatgtaggtgccaaaacaaatagagaaaacatktatttttataaaccayagatatactgagtcattacactacaaayacattccctaaatttaacttttttaaaatttttaatccttttccaatttatagagttgttcttctgtctagacatcaggatgtatacaattaggaagtacccagtgctgaaataaggtactgaaacttcagggcagtgcaaggtcctggactgtataattttagaaaaccccacccctcacttttctcccctttgtctttttaataaaatgaaagttatttggcttttcttttcattaacaaagttaatatctcctataaaataaacaaaggaaaccaagtcttatttctgtttgctaatagcagaaggaaataatgaactcaaatgtgcataagaaataacacagtggggcaaatcaaatcataaggtttgttctggctcttaacctaaaacatgctctattataaagagcaaataaactttcatctttgcttcaggaaaataacaaagaccaaaagaaaaacaacaacaacaacaaaaaaaaacagaagaaacactcaaaactctcacatttttaaatggtatatattttggcaccaatgataattatttaattgaaaactatgaacacaactttaaataaaatgttagtttaagactgttaattcacaatgtctaaattattcaaaattgtactatgtccctaaaatgatgttaatgtacagcaattggttcattgatttttattttttaaattttatttatttatttatttttgagacagggccttgcactgtcccataggcttgagtgcagttgtatgatcatggcttattgcatccttgacctcctgggcttaagtgagtctcctgcctcagcctcccaagtagctgggactacaggcatgcaaccagctaatttttaaattttttgtggagatggggtctcactaagttgccyaggctggtctaaaactcctagattcaagcaatcctcctacctcggcctcccaaagtgccrggattacaagcacaagccactgtgcccagctaattggctcactttaaattgcacaatgcctggtggatttgctttcctaaaagtaagagaaacatggtctctttgacacctgtattgcgaagtcaattagtccgttgatgttcagtgctggctccatgagatcaaagatgagctgaatgtggtgagccaaagggagatgataggatgttcctgacgcaaagcttgtgatttgttctagcacattgttagaaatctgtgcaaataaaaacaaaaataytgtaagaccaatattctaaataatcttttactaagataaatcatttttactttttaagacagttgaatctatacatgattctactttgacgaaagtcaaaacgtgtttctatagaaactataaaactatgtacaaagaaaatgatttcttcataactacaattttaaaaaatacaaaaagttgtcattcagacctaaatcttaagtattctaatggtagaacaactacaaatattaatttttagacacaaccatttgaatatcaatggatttgtaaagsaaaacagatgtgttttcttctcaatktcgtagtattttatttcaatcatcaacagatttctcatcaattgcaatataggaccaaactctaataacctaactatttcattagctattactttatatgtcaccgattattatcataaggacaaaaaaagtacataataaaaattaatccttcgaggaaggcaacctgacacttaaaagaactactcaatagtctgagatacttccaagtatgtttataaaatatatgtctaaaaccattaaggttgagaaaatatactgcatgaaaaaaatttttaagtaaattagaatactgcaaatgcataataaacagctttaaatrgctacctgagatgtcacttgatgttgatcaaaatatgaaaggagctggagtttagtgaacacagtctccagtgttggaaatgtctcctgtttgttcttcctggctttttgtccttcgtccccaactacataaacataaagcagatccattattttccatttaatagaagctctcgacatttttaatggatacttttttttaaagtatagcatacatacagaaaagtgcacaaattctatgaatttcaataaaataaatacacaataagacttgaatgcaaagtaacagaatggaatctcagaaactccctcaggcctctctaggcatgtctccctccctaggagatcaaaatcctgacacctaacaacttagattgctattgcctacacyggaactttatatataaaggaaatcatatagtatatgctttccacatctggcatcttgcaatcaacagtatgcttttaagattgattcatgttgctgaggtaattttaatgtgttctaaaaactaataattctcacttatttacagtattccaatgtgttactgtaccaccatttacttaaccattctagtgagtagtttccagattttagctatcataaaaagtgcctttataaacatttctcactaaacaacttttaaattacaatgatatccacaatgaaggtggggagatctcctgggctcactttgacttaatcaaacacttgcttggcatcttctttggagactcatcttgttacttttctgacacagtttaatatattttttaaaaaagaaattacatgattccttttttaatagtggcaaaaaattaaatcattccacattaatgaagaagtgacatgtttatcaaattagcataaagaggtttgaagaaaattccaattaaaaaaaataagcattgcttattctaggggtactcttcttaactgttctaacaataaaatccaaagctagcttcaatcctgcttttaaatactttaatattttatgtttacaaagacaaatctaaaaacaaaaaggaaaagttggatatatgattgataatgtcatttctagcactgtgattcttttttttttttttttttttttttgagacggagtctcgctctgtcgcccaggctggagtgcagtggcgggatctcggctcactgcaagctccgcytcccgggttcacgccattctcctgcctcagcctcccaagtagctgggactacaggygcccgccactacgcccggctaattttttgtatttttagtagagacrgggtttcaccgtgttagccgggatggtctcgatctcctgacctcgtgatcygcccgcctcggcctcccaaagtgytgggattacaggcgtgagccaccgcgcccggccagcactgtgattctaagtagttaaaggctaccaagacaagagttctactcctcacactgtcgtcttctttaggaaagtttaatttcagagaacaaaggttactttacagatttctctattaaagacacaagaaatgaacaagatttcactgaactcaaaaatattttgctaatggcaaatgtaatggtcttaaacaataacatgaaaataaaagagacttctctttcaacaataagcaattagtggttacagtcaaaaacaaaataaaacaaaacaccacaaggctggttcttttctaattccctaacaaagaaaccttgatgctagagtacatcagaatttaaaggtgctggggtaacataagttacaagcttgtgccacttttggccagtaacaccaaatataatgcaaagattaggaactaacaaattcattaaacctgcttattttttcaatgtctattctcaaaagtacaaattatgtatgaaattttgccttcactgtagctgctcacatgtcatgagcatgtttaaaataaccaagttttgaatttttcatttactaacatctttgatccaaggctgaagagctaacatcaatagtcttgtgcacaaaatgccttaaaagtgaaattaatgcattgattcagttcttcctgggacaaaacaaataataacaacagacttaaagaagtagatcctactaaaaactcccaagtgcacctttttatttgtttgtgttaatggactccatttatctatgtatcactaacttcttaaaacttcatgtaaaagaatgtaattggttcttagcaatttatactcattttaacagcaaaatgtaagaaatcagtggtgattctcaacgaaatactttattttaatgatatttacatgagtaacattatagtcaatatatatttttcctcatctttcttatgttaatttgcttttatracatattattgctcttttgttgcttaattttgattttcttttttaaaaatctttaagtcctgaaactttagcctcttaaaggttgtcatagtaaacttcactaatattttcaaaagatacaccattgacaaccaaaaaagataactggtcaaggcaaatgaaaaatgaactttgatcattcaactggaaatgttatttaaactttatactataaattcccctaggcaagacctggctgatctgacaacactcctaatgagttggttcctcaaaatattattttcatgtgttcccagaaatcaaatacatgctaacacaaggtctgttttccttaccagtactcatgttgctgaaaaaagtgggcatatttccattaatatgaagtacagttagctaatttctggtgcttacactaagttttaactagtgacttaaaattaagattatttacaatacagcagctcactacatcccaaattaacagctttctggttaaggaactttatctaaaatgaaagaaagtcaaaaatcccctcccaacgatgtggttccacagatgatgtttctatttactgaaaaaggttgaggatccctattctgagaatccaaaatctgaaattctccaaaatatgaaactttgagtgcagacataatgtcacaagtagaaaattccacacttgatctcacayaacaggtcacagtcaaaatgtagacacacaacacagtttattaagcatccycaagagaaaaataaaattaccttcagggtatgtatataaagtgtatatgaaacataaatgagtttcatgtttagacttgggtctcatccccaagatttctcattatatatgcaaatattcaaaaatgtgaaactatccaaaatccaaaacccttctggtcccaagcacttcgtataaggaatacctcacctgtttctcaaaaggcagcacagaacaacaatgtttttcgctttgtgagttcatatgctagaattgcctatttgagggactgctacaaagacaggacaaactatagtgtggcattaaaaagctgtgaaggaagttagtacgctcaacagaaaaggataccacattgcttccttccccttcccatacccctcaagccttctaaaaagttccataggmtctggaaagaccctctaaaaataatttagataaaatatgtattacgaacctcctgaaggaaatactgactcccccctaccccattgccaagtataccaaaagtagttttaaatattctttgctagctagtttcagggcttctaaattcaatcttctaaatgcaactgtttcctcttttctctaagacagagaaaacaccaaaacaacagataaacagttttcttagacagagcactttcttttttcaaactcaataatgacacatcaacaagaaggtttcatttcccttccacaactcttggttgcttcctcagagagctgaggtatttcaaagcccttaactgggaatggaagggagttagggaaggtgatgtgaataacaggaaggataactttcccactgtgttctgaggactatcacctctgacatcagatacccagaatgccatatgcagatagaaacacactgcctcttgtaccatgtttctgcatgtgcaccatgattgaccgggaagaaagagaacctatcttcattattaagatctgtatttttctctagtaaagatctagggtggacaaattctagcaatttatcctgctaaagtctaggaactggatctcctgtgaagagtccataaaaaagtatatgtactacagaacagtagggctcctagaggtggtttataccacgtgcaggaagaatgttgtttacatagagtaaacacaaactttctttttccttctatgatttaagtattagagaaataaacaccagtggtggtagcaggatacctaattatatatttaaaataatttgattgcctaatgaaataaacaaaccttgaaaagaataattaggcaaacgtgaagtggataattacaaaattccaattatgcaatgtggtgatacaacataaaggcacagcttcactgtaaaaactatgtcaaaaggatgaggaaagagcatttcaactaaagaagacattatagagcaaagatcaaattcttttatttgaaatcatttggagatataggtagccatcactacctactgcaatcatttttctcaataatgcaagaaaaggtgagcaaatatgctgtcatgattttcaattaacatgcaaatgtgagtgccccagaaaaaaaactaaccacaagcttggaaaattatggtaaagaaacagagaaatggatctcttccagactaaaggttttcaactcattcttcagtacttcatttattactactatagaaaatttgagaagtataccaaaaatcagaataaattacctacacctacctatggaatacaatattttaataaaataatatttaatattaataccttgtattaatattttaatacaagggttgctataaatggaaacaaggctttaaaatttaaatgtgcttgttcacatttcaatgtgagagtcattcaggaggggaaacgctctgttgacagtgacatagaacactttgataaagactgtgctcagagggaaggcaaaaggcaacacaatgggagcaaatgcattaaggttctttaccccctgtctctgtggtgctcttcttatttagaattttcaggatatctttggtaatcttcttcagctgatgccttgcttcatcacgctctttgccgactccatagagaaggattgtgcgctggttacattcatgacttgaagattcatcctgaaaaacagaaaatgcattctgaaactcttgtctgcaggggtggggtygcatttcatatccctgaaatgcactgaccacagcacctccatgctggcttgcggtggtggcatcccrccctcccttcaattcacctcaacctccactggcaacacccttgtttttccagtttggaacttgctaacattataaaaaaaaaaaaaaaagtgtcaactgacctgaagtcttaatagaagcacttgatgtgggcgtaccctacaaagtaagttttggctattgaaaaacttttcattgtttaaaattgaacatggtattaatttcacatcatgtaacatattgtctagtcatatttttcccttaaggaaaatgttmtctcttcataagcctggttttatatatagcaatagtaaatatttacatttagggaaaaatatcttgctaggatcctcaaacacctttataaaaaatattcctggacagggtgcagtggctcctgtctgtaatcccagtgctttgggaggccaaggtgggaggatctcttgaggacaggagctcaagaccagcctggaaaagagcaagacttcatctctacaaaactatatatattccatttatttccaacatgactgtgtgagatacatgtatatttatttccaaaagacaaaacaataaagcgtgtaggtgtcattaggtgtgaggcaaacagctgaaaatgcaaacatgttctgacatcaccactcttcccttctggaccacctctccaccaccaccccataggcacagtgaatccaagcaccatttttttccccacgtgggaaagaaatttagtcacagcataacgaaagcatatgcacaccactgaacacattcctcagccaaagtaacagagtccaagatgtgccctctcttgtgcctggctctgaatctttctatagcaatttctctcttggatcttataatcttccattttcttagaaaatgtccaaatctatcctttggtaaacctccttttcttactctatgtatatttttgcccatggcaagcacttacccttcccaacagcatccatcttatcctaaggagcttatatgagaaaagaattcctcacagagaaaacaaactgcactgtgttcctaattagcagtggcagcaacaaagaacaaaaacctcagactaggagaagtccaatgtttgacctggagtacttcacatgtgtactctgcacaaagtagcatattgcttctgtagcgttaaactaagcgcctgtttttctctctccaattctgttacttggctctcagtctttgtgtcggtctgtctttctcagggacacacttgccactgcttcccattgcactggttccttttttattatacattacaagaaataaacatttatatgccctgccaatctatctattccccacccccaaatgattcttaatgtttcaggtgttcaaatttgcctccaaaaaaaaaaaaaagaagctaggagcgagtttctcttagaagctgttcttatttaatatcctgagtacctctcccaaattttcaaaagatattcctaatcataggatacaaatgacataagcagtgatccctagagctggctgcgcatctgaatgagctgagctgcttgctaatttcccattttcgttgttgctacagagaattactgatatatttcttttttctttttttttttttttttttttttggtctggtggtttgtgtacatatgaaccctaggaaggaaacaggggggcactaataaaattatgaaaaatgaaggcagtgccagtcacatgctttggcaattgttttcagttaaggcatatcagatggtcctaatgtaaatgtccatgtgaaggctgatgactgtagcatagttattcagtaactgtttatagaatatctatttgaggcaagacaaaatgctaggagccctgaaaaaatacaaggatgaatgattcctgtcttcaaggagcacagattcaatgtcatcaaagtagtatttacagacctagaagtccaaagaggggtggtgaaggaaagcatcctagaaagagccacgtgctcctcacatcgcacaggatcactatggctccaaatttactgataatagcccaagcttggggtaagagagctgtgactgcatactggttgtgccacttgccaagtccatgatctcgaataataaacctttctaaacctctaattcttcctctgaaaaatggggtaacatcgcttccttgtaaggtttttgtgagaaaacctgggataaagcgtgtaaaatgcttcgaagtataatggacagtgttcactactgttaattcacatgctagacttcccctcctcctcygcacatcccccacacccacaccgaactgccttactcaacatttcaccaagactccagggcacttcctccctttgctgttgctcgtccttacacctaaaatactctcatagccacgatttcacttgctgaaatgctatgtacaaatacagtgtcagttccctcactctgtcactccagtttattgaaaacctccccacagaaggaggggaagtagactttggagcatttattacagtataattcacttattttctaggtatttgtttaatgtctgtcttcctcattagtgtgtaaattttgtggaagactccatgtctgttttgttcatttttataatctccttaataggcaatgaattagcatctaatatttgttgaacatactaaatacaaaataagcagactaatgaacaaatatatagctaaaggaatagggcagaggtgaagataaggagaaaaattagttttgtaggaaactttwcctgatgattaagtgttgagaaaaatgaaggggagatgtgagagacaaagctagagtaaaaaagtttgtagggtgaactaagttttagtggtgggaatgaagactaagaagcaaaatgaagaggtatctaagaagttaggaaaggatcaggcttttgaacccaaggagtaaatgtgcatctcactggacttcaagatgtatccactagttaaaattatttataatgtatactaataaatagtattgtttatattaccaagtaattattattaatctatttacaatgtataaaaaattaatacattataacagcagggaacttttgaatttacatgtaattgcaaggaatttgaagggtaggtagaaatgtgtaaatgtccagtaattggtttgatatgggccctaacacagaggtgacagctcaggaataagggcagtatgtcaagtcctgggaggggtgcaaaaccttcacattatgtttagggaagaagggctaagagagctgagatggtgaggggagaaataagccagcaaatggtgcacatacatgctccttaattaacaagatactataattcagggtcacacaagtcaggggaggggatacataagaaagagtgtcactgacaacgtccagtgaggttaagaagtcacaatggatgtgacttcttgtttactgacaaaccatgtgtgaacctcaaaggagaagaagtttctctaagtggcagggcacaaagctargaaacaagcggttaaagtaagaggtgatgatgaaatggtgaagatagggaagtgacccacatttaccaggagttgggcatgaagaacaacagcttgagaggaaagagcgttatgaagatcatcaaaagactcttgtttcagacctatctttcaaataaacaaatttccatagtagaaatcaagattggggaacagataactgatgataaaggatataagagacaatggcctcttagctggattaatrtggaaagaaagaaaggaacatctttctacttgaccatcgggaaaaaaagaaaattagtgaaaataaaaagacattttgaggtgaagaagacacttaagaagctcaaatcattccttggccttgatatgctcagggagttgggccaaggaacaaagtcatgagttgagaatgcagggataaaactgaaagcaaaagcagcacgtagtgagctggaaaagaatcactgctcaacctctataaggggtgtaaagacagtattcctttcttagcattaatattttcagggaactcatgctaggtgttactacagtagtcttcaaataggacaggcagaggcattttagaagctactattyttcaagagcctacaagatttgtttacatcagtttttcatacaagtagaaaatgtaggctgggcatggtggctcacatctataatcccagcactttgggaggctgaggtggaggatcacctgaggtcatgagttcgagaccagcctggccaacatgggaaaactccatctctactaaaaatacaaaaactagccaggcgtggtggcaggtgcctataatttcagctactcgggaggctgaggcaggaaaattgcttgaacctgggaggcagaggttgcagtgagccgagatggtgccattgcactccagcctgggtgacaagagcaaaacttggtctcaaaaaaaaaaaaaaaaagaaaaagaaaaaagaaagaaaacgtagaagccttcaaatagcaattcataacaaatgagaataaagtcaacctaagaaaatataccaaatattttcaaaagtatcaacgatttctgctctttcaacttggtgtttaaacgccctcaagttgcacagttgtaagtaatattaataatctgagataaacacccaaaaattactcttgtttattccctcaaggatacagttgttggacaaggaaaagcatcaactggagagtctgttacaggagacgtcaggctacctcttttatcctagtccacctgctgctattgaattgaatgtgtcatctcccatgtaaactaagttctaaaaatctcgtcctttagatcaattactttctttctccagatattatctcatactcacagaaacttaatagatgaagaaactagaaacatgcatgcccaaaaccctggyaggcttgttgtactacrcgaattaaaatatgtctcttgagccaaatgtccttagaaagaagaaatggagttaaaggaattgaggtctgctctaattcatctttatttctttaaaataactgattagaaattttgccaaaatgtgtmtgtgttgacaaagatgtcataatgatggtaagatgatcagagctgtgtattatcctttcaccttactcacattttctgatatttcaacaatgattcaattatcatagaatttttaaattactaatgtccttaaggaaaaatgaaaaagatctcactcagaatgcgcttcctttcttccaaacactaataaaaacagatgaagtggatgtaattgtccttctgataagacaaaatatggcacttcatacttcccagtacttcctaatttttgcatgctctacttcaaatgcaaatccagtatatatccggaagtaaactgcacatagcaacctatcacgtctctaagaaaagcagtaaaaaccagtctttagaaacaataaatgcatttagttaaaatttttagcttattaaataactcttaaaagatgccttaaaacactatttctttcagctgtatctttcaatataccatgctattttgtttagaataaaacaagttcatataaatgttccatcaggaataagcttcgagcctgggaggaagaatgggtgtgcacatggatgaggaaactgttacaggaatgaagaaattaacaggtttttttttaatcattagtaactatacatagagtatattttctgtaaatcaagaaaataggaggcrgatttaactacatttgtatattaaatctttgttctacacagcttatagtccacagtatgactgatatttatatatctactagtcctcttcttgcaagcagaacacttaagactgggatgtcagataactaggtcacaaaagacggcattcatttttgcgaaatatttcaatgcccaagactcgttacttttggaacctgttggtatctaacctaaatttctatattccaatggataaagccaagctagcagacatgactatgcactgctttaaaatacacaccctcaaacaaaatattaatgtcaaaatgaccacatttagaaccagagaccactggaactaaaacagcctaagagctatcaaatgtcataattatatctctatcctcctgcccagttccaaaagactacaggtttcagagtaatcccatttgaagcaaacattttcagatgagcagactacctttagtagacttggtaaaataaacaaaccagttaagccacttaaaagtaaaaattctgttcatttttctaactcatctcaattrtacaaaataaccaaaccaaccaaagttagctctgttcccaacactaacacaaataactacaaactgtatgtgttgatgttatttactaatgagagattaaagtatctataacttgctctgcttctattcatatgaaaatatacttctgtaactgagatacttttcacttaaagattttagtcactttcagcattaagtggtctaactggcagtcttcctccaatgaaaaaatgttatcagaggtggtttgtaaataggtatgtggttgtgagttaaaaatcagaggaaaaataaagttaatttagatcaagaactgaagcccttcttttatccctcaaatctctactgttagcccttctagaggtttagaaatataaattctcaataaggtagtatgacytaagtattctgaattagtaatatggcagattgatttgttaaaaataatcattttcttgaataagccttgtttcatttgatggtcttagaaaaagcatcataaacatcctttagcatttacaatttgctgtaaaggagagtatggtccttattttattgaaagacgtacaaccatcccacacgagattcacttctcactactggggcctcttagtgggagaggggttgaggagagggtgtgatagggaaagattctcaggtacagaaatacacaaatacagattctaaggctaactagacagcacaggtcagaatggggtctccatstaacttcactgctctgctcttcagttcccctcatccagagaatgaggatgatacgcgtacttcagagaatagttgagattattaataaagtgagttaatccatgacagtgtaagaaattaaatattgacaattattatttgaagtacatacagcataaaagctctttttaaaattttgagactccaacaaataaggaaggctaagatttgtttacaatagtcatatttaaaaataacaatacaaccctttccaagagtttaatatcaaactaatccctttaagatgaccaacatttggggattattatgtgtctgaagtgactgatattaatagcttcaagttctaaatggcaacaaaattcttattccatttaaatcagtggtcctcacatttgagtgtaccaagcatcaatggaaggctcactaaaatacagatgcagggtggggcaccccagagtttttgattcactcagctagattggtgcccaaaaatgtgcatttctagcaagttcccaagtgatgcagagctgctgctctgcactgtgaaaaccaatgaagatatttaacatgtaaagacatagacaaatactcaaaacgcagaagataaaaccaaaacgtgttcacagcaaaggcaccaacacaaatgattcccactgataacagaaggacactgcagtttgagacaccagggaggtgtgtttctgcaaagcaatatttacataaagttaaagcagcacaggtgttggagaggatgtggagaaataggaacacttttacactgttggtgggactataaactagttcaaccattgtggaagtcagtgtggtgattcctcagtgatctagaactagaaataccatttaacccagccatcccattactgggtatatacccaaaggattataagtcatgctgctataaagacacatgcacacgtatgtttattgcggcactattcataatagcaaagacttggaaccaacccaaaagtccaacaatgatagactggattaagaaaatgtggcacatatacaccatggaatactatgcagccataaaaaatgatgagttcatgtcctttgtagggacatggatgaaattagaaatcatcattctcagtaaactatcgcaagaacaaaaaaccaaacaccacatattctcactcataggtgggaactgaacaatgagaacacatggacacaggaagggaaacactacactctggggactgttgtggggtggggggatgggggagggatagctttaggagatatacctaatgctaaatgacgagttaatgggtgtagcacaccagcatggcacatgtatacatatgtaactaacctgcacattgtgcacatgtaccctaaaacttaacgtataataataataaaattaaaaaaaaaaagttaaagcagcaaaacactttgcccttcaatctcacccctaacatattttttgcccttctggtttcaaagttaaayaactgtaaataattgtgatacaaggatgccttaatttaatgttatattttcccaaaaactcaaagttaggtaaagaaacaaaaaaaaattgtttatatttaaattctattcaagaaaagcatgaacgacacagtatataataagcctggcaatggatacaatcacttctctaatgtaattttggaatctgctaatttataatagaaggaagctgtttcacctacaaaggagttaatcaaacacaggtttaaaataatgacattattaaccaagggaaaaacaaagggccagagacttaacatccctagccagcacgcattttgagttaacataattacttgttagaagaaaatacatcacccagtgttgyacacaatatatttcagataaattaaccacccaagaaagcaagcttaaaatcttctccaggaagcagacttcgaaggcttgatctcaacttggatttatcatttgcatagaaaayaaccataactcgaagttataaatcatcaactctatagcaggtttcagtaaaaagccgcaagattttaaattgctttttaaaagatgacttctcagccatcctcatcccacatttcctgggaaataaaagcagaagtcctaaaagaggacagatagaaattcagtgtctgcatagctttgagtccagtgtttgaagacaatctctgattgtgaagccctctttttctctccttctatttctctctagagcactcaagactttactgacgaaaactcaggaaatcctctatcacaaagaggtttggcaactaaactaagacattaaaaggaaaataccagatgccactctgcaggytgcaataactactacttactggatacattcaaaccctccagaatcaacagttatcaggtaatgttatttctacaagtacttgacaaatatatgtatttacactctgatatgtgtgtacattttttccaagtttctcttaaaattgtaaaccttaataactatcaatgcaagcatgtatttggaataaaaattayaattaaaatagaagtctaattagtgatgtcagagacaattgttaattagcctctttattaagaaaaattatacaaagcatagaaataaaatataaatggtcttagttactttgcctcaagtataaaatgagatttaaatacagataaagggagctgaaattctcaatgtcaagaatacttgttaaatatcttacagactacacaaaatgtatattcactaagtcgaatttccaaaacggtcagggatgaactaagaccacacagcagtagcaggaaaggttaaaatcagtgatcttgtattggaaaacattargttttgtttagcattattttaaagcgctaaataggtgaggagatgctgaaaattgaagccatactgtgacaacatgattcttaatcgttttccttccataattaaggacagaaaggaattccatggacattttggggaatttaagtgctacattcatttatctaaatatcttttacacgaaagttattttttaaaatttgttatttgtactttcaatatatctctgattattaagaatattttatatagaatcaatttcacttatctctggtgaaataaaaagattacaaaygtcatttcaaattcccaagatgtagatgccatatagcatattcaagtcacttgttagttttcattatagctgcctattgtggtaataacctatattttattttagctaccattacacactccataaatctggaaagtatgccctgttttgaggaatgccaactcatgaccatatatacacaggccatttctgactcttatttttttttttactgttttaaaatttatactgaatgatattcaagaaaatgtatgcagcaacttcaaaacactgaggaaagttggaaataagatacacatgggttaaaatatttgaagcagaataatgaatctccgtgaggccaatctttgaatgagtgagcaatatagaggcaggaatatcttccaaatataaagaaaaaaggtcagcttttttttttttttactgattcagtattttatttaataagtttcccaagagtaattttycatcaatttcttccccctttttattactttaggattctaacaggcaattatccatcatttctctctcaactgttttgacggtactacagtaaaagaagctcagaaataaggacgttggggggaaaagtgactgtgaatagaaaccaaaaagctaaaaggcatggaggggaagctagagaagagtaaagcacagccccattatttctcttccagcttttgcatataaatatgagtgagctctaagacaaaatgtgctttaagaggcaaacattcaacaaataaaaaaatactaagcatctataacttcacatattgtacttcagatcatttctcttcagcagagatgcaatatttgctgcaatgaaatattttgggattcagttttctgtgttcatactaactactacaatgaagatgagaaacctcaacttttagaggaggctgtgtccaaaaaagttacacacagagataacagcaataataactaccttaggctgaaaataaccatcctctcttttgttctctaggtaaccaacaagaaatgcaagccgtcgacaayctcacctctgcgcctggkaacaccagtctgtgcaccagagactacaaaatcacccaggtcctcttcccactgctctacactgtcctgttttttgttggacttatcacaaatggcctggcgatgaggattttctttcaaatccggagtaaatcaaactttattatttttcttaagaacacagtcatttctgatcttctcatgattctgacttttccattcaaaattcttagtgatgccaaactgggaacaggaccactgagaacttttgtgtgtcaagttacctccgtcatattttatttcacaatgtatatcagtatttcattcctgggactgataactatcgatcgctaccagaagaccaccaggccatttaaaacatccaaccccaaaaatctcttgggggctaagattctctctgttgtcatctgggcattcatgttcttactctctttgcctaacatgattctgaccaacaggcagccgagagacaagaatgtgaagaaatgctctttccttaaatcagagttyggtctagtctggcatgaaatagtaaattacatctgtcaagtcattttctggattaatttcttaattgttattgtatgttatacactcattacaaaagaactgtaccggtcatacgtaagaacgaggggtgtaggtaaagtccccaggaaaaaggtgaacgtcaaagttttcattatcattgctgtattctttatttgttttgttcctttccattttgcccgaattccttacaccctgagccaaacccgggatgtctttgactgcactgctgaaaatactctgttctatgtgaaagagagcactctgtggttaacttccttaaatgcatgcctggatccgttcatctattttttcctttgcaagtccttcagaaattccttgataagtatgctgaagtgccccaattctgcaacatctctgtcccaggacaataggaaaaaagaacaggatggtggtgacccaaatgaagagactccaatgtaaacaaattaactaaggaaatatttcaatctctttgtgttcagaactcgttaaagcaaagcgctaagtaaaaatattaactgacgaagaagcaactaagttaataataatgactctaaagaaacagaagattacaaaagcaattttcatttacctttccagtatgaaaagctatcttaaaatatakaaaactaatctaaactgtagctgtattagcagcaaaacaaacgacatccaattgtcatgctgcatgcaaaactacacagaattcatgttttgcagagttttgccaaaatgagtaatcatataatatttactgtaatttttaaaatacattatcgttcacaattttattttttcataatcaactaaggaagaacgatcaattggatataatcttcttaccaaaaatgatagttaaaatgtatatatatcctagtcccctaaccaaatcctgacctattgggatacttataaaaatttaagtaagtgggatacacaaagaataataactattaacttttcattattagcaaaaacctaagggatttaaactaattgaaactgtatttgattggacttaattttttatgtttatttagaagataaagatttaaagaagacctttacaataaagagaagaaatatcgaagtcattaaaataaggagacttacttttatgacattctaatactaaaaaatatagaaatatttccttaattctagagaaactagttttactaattttttacaacttcaataataccatcattgacacttacctttattaattagcttctagaaaatagctgctaattaggttaatgaacattttaccttagtgaaaaaaattaattaaatatgattacaaagttgcacagcataactactgagaggaaagtgattgatctgtttgtaattacttgtttgtattggtgtgtataaaatacaaaatttacattaaactctaaatcattctttgttgtaaattctttgttcaaagatattagataccatgactcaccataccatatacaactacatcaaatccatttaagaattaatgccaacacctttattacatgttattgtgcaaagtctcttctgaagatgacttctcatttcaataagttcaaatgtaaatgataaaacaggtcagacttataacatgcagtctaattctacacaaggcatattcgctattttaacataaacaaaacatataacacatgtggaagtttacatcacttatctcaattttttatgatcctcagaggtgactctcaaacagaaggaggaacagacatcaatacctaaatataatgccagaagaaataaaagggtgtattgttgtataaagttcactgaactttaataataatcacttttattgaaaccctctacaacctctgctgagttctatttcattacgaagctgaactcatttaactactaagtggtattcatttccaaccagccacatttctttctccggcaccactaaaagtgagcactcagtgtcagtggagatacagagacagttcatatagtatataacctatacactgctgggataaacagcagtaataatttctgctatgtagactagtacagttcactctaaaatcatatgcataaatttacatgttctataggaataccaggatatttgaggtagaagacaatctagagatcaactaatctaaccttcttcttttgcatataacaaaaatgaaaggcagactcatccctccacccattcaagttggggtagagcatggactgaaactgactacttcacagtgtcatggaggtcagatgttcggagactacagaggggacacaaactacccccaaaatctttgtcactgagatgacaatttccacaagagatgaaataaacagaaatgctaatagtaatatggtattttagtaaaagtaactgaaagtatttgaaattacctatgttttatgagtatgtatatatgccatggaaattttacataaaactctaaaatcacactttgctgggatatctttattcagagaccttagacatcatatactacatcaaactaaacccattcaaaacagtgtgagagttagtatttatggagggatcattatacataaaacatgccattatctctagcttttggcatattaatatatattaaccccacatttcacagtgagttttacttttttaaatgaagccaaattctgtagactcaggtccagatgtgaaaagttcaaaagatgagacaacaaaatgtagtcttgcccatagcctcagtggcttacaagtcctaaaggtattggttattgacagtttttctcagtggtttcttacagaaaaggtctgaagcaggtgttggcaaactatagcccacaggccaaatcgcagcccactgcctatttttgtacagcttgggatttaggaatgttttgttttcatttttgtttttaattgttatggatacataataactgtacatatttatgagagtagaatgacagttactagagagtcatggggaaggaggagataaagaggtactggtaaatgagtacaaaaatacagttagtgagaaggaataatatctagtgttccatagcacaatagggtgattatagttaaaaatactgtattgtatatttcaaagtaactcaaagagtgggttcctaatagaaagaaatgaatgcctgaggtgatggatatcccagttaccctgatttgaccattacacattgtatacttacatgaaatatcacgtgtaccccttttcaaatgtttgtgaggaaaaaaatcaaatgaataaaatttcatgccgaatgaaatttatatgaaatttgaatttcaatgtccataaataaggttttattggaacacaactattcaggttttatccatggctgctttcatgctacgacagagctgagttgctgtgatgtagactgcatggctcacaaaacctaagtattttctaactggctctataaaaaaaagaagactgggggacctggtgcagtggctcacacctgtaatcccagtactttgggaggccgaggcaggcagatcacctgaggccaggagtttgagaccagcctggccaacatggtgaagccctgtctctactaaaaaaataaaaattagctgggcgtggtggtgggcacctgtagtcccagctactcaggaggctgaggcaggagaaccgcttgaacacacgaggttgcagtgagccgagattgagccactgcactccagcctgggcaacagagtgagactccatctctaaataaataaacaaataaaaattaaaaaagaagactgcttccccctggaccagtactttaaaaacaggtggaaaaaaaccttttacaaaaaaaaaaacacaactctctttttgtacctaggtgtttcaatcattttgcactgaagacatctgatcactgttcactgccaacactcaaggtgtgattacaatactgtcagtgggaactaaagatgtggaaatgcacttcataatcaataggtagtgagaaatcgccttttttttttaaatggggcaagagcatgaaaaggcaatttccaggagaaatagaaatggcaaaaaaaaaaagaaagaaagaaagaaaaaacacataacatcaccaataaggaaataaatttatatttatataacatggctttttcacttacagatttcaaattaatttaaaagattttttttcttttttttgagatagagtcttgttctgtcacccaggctggagtgcagtgacatgatgtcagctcactgcaacctccgcctcccgggtacaagcaattctctgcctcagcctcctgagtagctgggattacgggcacctgccaccatgcctggctaattttcttatttttagtagagacggggtttcaccatcttggccaggctggtcttgaactcctgacctcatgatccactcatcttggcctcctaaagtgctaggattacaggtgtgagccaccatgcctggccaagaatcccactcttaattgaacaataaattsgtacaatctttctggaaaactatttgaaaatattatttaacattttgacaaataactttttcctagaaggactgaaccaataatccttcttctaggaaacttcctacaaacatgctagaaaaaatgctcaaaaatatatggacacatacatgctctatagcattgtttttaatagagaaaaactattatcgtaaactaactacatgcccatcagtcgcagcttaactatggtaaatttatgtagcataactgattttaaatttgattggcatgttgttagagaaatgcagatcaaaaccacaatgagacatcatctcacaccagttaaaatggctattacttaaaagtcaaaaaataacagatactggtgaggttgtggagagaagggaacacttacacactactggtgggaaagtaaattagttcagccactgtggaaagcagtttggctttcctcaaaggacttaaaacagaattaccgttcaacccagcaatcccatgactgggtatatacataaaggaataggcgttattctatcatagagacacatgcatgtgtgtgttcatcacagcactattcacaaaagcaaagacacagaagcaacctaaattcttatcattggtatactggataaagaaaatgtggtacatatacaccatgagatactatgcagccacacaaaagaaagagatcgtgtcctttgcaacaacatggatgaagctggaggccattattctaagcaaactaacacaggaacaggaaaccaaacaccagatgttgtcacttgtaagtgggagctaaacactgaattcatatggacacaaagaaggaaacaacaaacaccagggcctacattgagggtagtgggtgggaggagggtaaggactgaaaaactacctatccggtaccatgcttatcacctgggtgacaaaataatctgtacaccaaacccctacaaaacacaatttacctatgtaacaaacctgcacatgtacccctgaacctaaaataaagttaaaaaaaaaatcacgtcagtctacatgtactaacatggaatgaaacaaaaatccaatacataaataaatgtaaatatatttgtacacatatattggtatgtatatgtattaactttcactttctactatatatgtttgtatttcaatttttaaacatagtgtgaaatattaaatgttccaaatagcagtgaatttattgcctatctctagctacatgtagatattttctactattgttcttactcagaaaaacagattgttacattaataaaaagtataacttatttcagcttattattaccacttttagtttaccacttttagttactcttgtatggaatttttaaaacaatttcacataatctgagaaagtaccatggtatactttgatgggaagtaaaagtcttttctaagagtatagaagtataggagttcctacttcaattttcatcccaaatgaaagcaaatacttcctcatcttttcacatattatttatatggtactgggccttggactgtcaattttgatgcaactgagaaatcccaaataagactacaaatggaaatagtagtttattcctatctggctagagactgatttctgtgacttttcattttatcttctttgtatcccttctgatcacactgctttcactcaatttacattggcataaagtttcacaagtccattaaacattgtggctgattgtttccttctcacacatcaggaactttcagctcaagaactccagaatttggcaaacaattccactgtcaccctatctatggcttaatcggaggcaagagagtgaggcaggttccaagcatgggctctggaaccagaccaactgtgtgactttacggcagatttgggttgcatgatatggggaaaatggcttaacttctgcatttccttttttctcaactctaaaaatgggaccaatctctggggattgttaaggattaaataagataatataatcacttaaaacagtatagctagtgtgactttactgatttttaactacatttccttagagccctataggatcttaaatgtttagtttattcccatttgataggctcctagcctctgggatctttcactgtatcttctttgattcttctctcctttcgtgagacatcaccatatgtatgcacaacattccaattttctttcaatttcatttaacaagaaacctacatgatacctaccacatgacagacattattctaagcactggtgaatgttcactcattttattcttttaacaacactgtaaagcaaatactattatttatttttattgtaaagataaggcaaccatttcatagtgggcataagcagcttgcctaaggtcataagaaaagaaagaattggaaaaaggaattgagcccaggcactctggcgcctaaacattctgctgagcagcttctcagctgtgtcttcaagggcaaaaggcctccccagcaggcaatagtgctgctgtaaactaaggaaaaatcagctaatacataagaagcacaaacacatagaaatgaatgatctattggatatttactatagtcaaacactttgacatctaccacatttaagagactctatttccataactctagaaacaggcactgtaagtcagttcctctttggaaagtttcccacacttcagtgttttgaaatttgaccaagaagtgatttccagttttcagattatgaaattatcctgcacagaatttatcttgcttaaagaaaaactattccagatcttcctttagattatggatttggggctataggaaaatttacaattaattttgtaggttaaatttctctacttaagaaataaaggattttttttcctctgctgaagcaaacaaaaagatatacatttatgtttaagacatac

SEQ ID NO: 5620 - DNA, 19277 bp, Homo sapiens
cacctttcaggattgaagctcaggattggaatccagattgatgccatgtgggcaccagctgatttatgctcaagttgaatgacatttatggacaagagccacaggaaaactgacagcagagaccttgctattttatgaaggaaaatcacgtttacagtgctgacctacacatgcaaatttacggtctcaactgatcacaagcctctttgggatctcacttcatctgaggatgagctgccaccctaaattatggcaccaaagatatagttccaaatcttctgttcaggtcctatgactctgaccttgtctacttgtcagggagaataacaatgaagacaggcatatcgagctatctactcaaatcagccagggtttctcttccagcactactgatactttgaatcacaaaattatttgtctgggggggcggatgggcgggtgaggggctatcctgtgtaccgtagaatgttcagcagcatttagcaacattcttctacccactagatgccagtggcaacccccttcctccaattatgacaactcaaaatgtctccacacattgccaagtgtcccctggggagcaaggccatctccaactgagaaccacagaaatagatctttaatatattctgtcaaatttttgaaaagacccttgtctctcagtgatgaaaatgcctgattgactcatagctcaaaccgaatgggaaaggaataactaacaataaaagctacctgaattcccagcactttgggaggccaaggcaggcagatcacgaggtcaggagataaagaccaacctgggtaacacggtgaaaccctgtctctactaaaaatacaagaaaattagccaggtgtggtggcagccgcctgtagtcccagctgctcgggaggctgaggcaggagaatggcatgaacctgggaggcaaagcttgcagtgagccaagattgagccactgcactccagcctgggcgacagagtgagactccgtctcgaaaacaaaacaaaacaaaacaaaaaactacctgaatgtaccaaatagcaattgaagtttgcaaacaatgaccttgagtcatctgcttacagaaggtgtctatctgtcttttggacaaaggacttctgatgaagaggatggagtggaccatattctttaatccatgacgttatttgtccccatcaaatacaaatatctaaatgtatttatatattttcattatcactagtcctcattctcattcccctcactccccagtgggatctatcctactaatatatatccttttgtctgtgtctttgtataatgtgtactattttgaatatatcattctcatttaagtcaatagagttccgcaatcacttactcacaattcttaaacttacacagctctggacaccagaagttttctcttaaattcttaacagcgaaatctgactgaagcgacaaggggttacttggggttctttagccactcaatgtaactattcctatgttttgctgcggaactattatgcttgattatgcgatgccacctcttccttttctaaattccaagcattttgaattccaaaaacaaatctgagcccccccatttttttctttttctttctttcctttttcttttcttttaagtgagacagggtctcactctgttgcccaggttagagtacagtgacacaatcatggctcactatagccttgaccttccgggctcaggtgatcctcccacctcagcctacttggtaggtgggagtacaggcatgtgccaccatgcctgactaatttttgtattttttgtggagatggggaatccctatgttgcccaggctggtctcaaactcctgggttcaagcaatccactttccttggcttcccaaagtgcttggattacaggcatgagccactgtgcccagccccaaagggttttaattgtctacttatacattatagagagagatcttactctgttttcctgtttttactcagtattatatttttaatacatatccatgttactgcatgtacatctagtctattacttctaactgccgtagaatactccatgaagtggatccctacattccactcacccactcccccagtaatgagcagctacattgcctccagttccccatcactacaaacaatgacttaatgaacatcctcatacatgttcctttgtggacctgtatgagaatctccataggatatacacccagggttaacagctgggtcatgggtgtgaatatacttaatctggtcaaggaatgccagaatacccttcaaaacagccatgtcagcctactggcatggtgtgatataatagatcctgtagtcccccattttcccaacacttaccagtatccagtgttctcaacttgtcagtctaagaggtgtaaagagatatctcattctttttttcatttgcattttctgatataactgagcctccaggtatgctcattagtctttggggtttcttctcgttaaattgcttattcatgagctttacgcattttttactagtgtttctgtctttttcttgctgacttacaagagttccttgtttttagacattgaaaatattggttttagacactgaaaaatatcttctctcaatctgtcagctgtctgttcatttggttcatgcatagaggaaatgtgtaaaacagaaatcttcatttttatgtaatccaattgataggtattttgccttatggtttggagctttagaagttttaaaaaagtccttcccacttataagtgacaaagacagtcctctatattttcttctactactgtaacaattttacttttcacatttggtctttaattcacttccaaatggattcacctctgttgttttagattggagtccagttttatttttcatcatacgctgaacattttctctttttaaaaaaattttttgtagggagtttttgctcagactggccttgaactactgacctcaagcaattctcctgccttgacctcccaaagtgctgggattacaggtgtgagccattatgcccagcccattgagtattttctactaaatattgcatgttttcctcattgatcagggaatcatctgtattatcttatacttaatacccaaatatacaaatctatctataatttctctactctgtttcaatggtccatatgcctgatctgttgcaaagatcactactttaatttctatggctttaaattatgtccatatgtgatagggttagtcccccttttcattattcccttagcatttttacttaaggccaggaacagcagctcacgcctgtaatcccagcactttgggaggccaaggtgggtggatcacttgagcccaggagtttgagaccagcctaggcaacaaaactagactccgtctctacaaaatacaaaaataaaaattagctggacatgatggtgttgcctgtggtccaagctactcaggaggctgaagtgggaggatcactttagcccaggaggtcaaggctgcagtgagctgtgactgtgccaccactacactccagcctgggtgatacagtaaaaccatgtctcaaaaaaaatttttttaacttagtcatagattttattacatctgtattttagagtaggcttattattaagtttctgagaaaatttatttgtagcttgtattggaattacattgagcatgtgaattaacgaaaagaggcttaagctttctatatagagaaaccttccacccaagggtatagaattatttaattaaatcacactatattcttgactgaactttaaaatttttctccaaacactattctgtagttatccaagctcatgtaataatcataataactctatactgtaggtacttttattatcatcatttaacagatgaggaaactgagcccagagagataaataactcacctaagaacacacagcaagtaagtagcagaacctggattaacatagtttagtccatactcttagccattatactgcctctgtatctacagtcagttactttatagtttggctgcttctatgcatgtcatcttgtttttattacattttctgatggattgttgcagatacaaagaaaatcggctgattttttttaagttgatatgtgtattgcatgatgttgttaaattctcttcttagttctaatagtctattaattttttttctttttgtatatcaactgtaaaaagtgacagttttaccttttcttttccaatgtttaaagctctcatttctttttctttccttatagcattggccgagacctccacgacaatgctacacactgtgaagtagtgattgtgagctaagactgtcacttatagaaaaatcatgtattcctagaagaaggttttcatttcatcttagctagaggacatggagcacttcaggaaactatttcacaaaaatgtaaattagaaactgtgtctggtagccaataatccatttttaacagtggccctgtgctcatctaagcaacagaaattacttttgtataggagatggcccttccaggggagaaacagctcagttgtgatacacttgtcttcatcctgactttaagtacatttaactccacactaaacccttgtggccacaacacagctctgcacctgtcatttgctctagacaaactgctaaacgcaattgtttctgacaatggattactctgtatcccgtgggggaattctcagacagcagcattagaaggggccttagagatcaaccatttctcttattttacacacacctaaaactccctacagccgtgcttcatcagcttcgagcagatgagccacccagaaggcagctccagttattaggtcctagggcctgggtgtagtcaggccctttggaagctccaagtcagagatcaaacacatcctccccactacccacgcctagggtgactaatgcctgtgggaaaaacaactgaactaaaaagtcccacaggaacctcaaacccagcacatccaaaatggaacttctcaccatctcctccaaactcagtcctcttatacagtaatccctgtaaagctagaacaatctccattccccattctcagggccttcctctcccgctcacctgaggagctaccaagccttggcccacaagccctctgagagtccctcctgcccaccctgtgttctccatactgaataaggacttggccacaccttgtcaactcttccctctgctctactcctgacccctggatccatccttcatgctgtggctgaagggatccccccatcatgcaaattctgccacatctcccgcctaaaacccaggaagactccccactactctcagcacagaaagtacactccttagtatggcatcccctgccctcatggcatggccccatccagccctccagcctcacaccctgcaaggacacctagacccccacctccctcaacccttcatgactgcgcttctgatccctgtttcccctggctagaccctgcgtgccctcccgctggaagcggtctaatgcctgcttgtttttaacactcaggttggggcccctgcctgctcccgggagcctttgctgactcctggaccccgttgctccggctgagcgtgggctctttctctaggtctttcctcccaggactctgtgtattcatcctatcgttaaactggattctctacaagagtaataattgcagagtcagccagctctcatcccttttcaggtttcagaaaagacctgtgaacaaaacgccttgagtctgatttagtgtggcaatgccccaagggtcctgttctccctgggtgtcctgcacctggtgcaacgtcggcctggcatctagtgagccatctaaaggaacgatgatgagtgaatgatttgcctaccccttccagtactaggctggaggtcgtggttagggcccatccctacgcaggacatgcaaagtgggaggcactcctctctctacgtcggcagggggcgctgcacagctgcggggcggggtagcttagacacggggcgtccggctaaggccggggacccagggtggtgggcggggtgtcccgcccgcctgtggaccccgcgcagtaactgcgaacatttcgctttcattttgggccgagctggaggcggcggggccgtcccggaacggctgcggccgggcacccsgggagttaatccgaaagcgccgcaagccccgcgggccggccgcaccgcacgtgtcaccgagaagctgatgtagagagagacacagaaggagacagaaagcaagagaccagagtcccgggaaagtcctgccgcgcctcgggacaattataaaaatgtggycccctgggtcagcctcccagccaccgccctcacctgccgcggccacaggtctgcatccagcggctcgccctgtgtccctgcagtgccggctcagcatgtgtccagcgcgcagtgagtactcagcccgccaggtctttggctcgctcgggtgcggaggggcggctgcttgggaagagtgggtagaaactcaagtctgcctaaggagagactggaacagcagcagccgtctcctgcaaagaggaataagaataggggtctcaccgtgtgctaaatagggcatgtctcttttcatctcgaaacagcctgatgagctatcattatgcccacttcgtagaggagaaactgaggcccagcgtgggagatttcctgctttcctgcctagggtccctcagctacaaacagaaggcagatcctagccagttctaaagtcaggcttggccgggtgcaatggctcacgcctgtaatcccagcactttgggaggccaaggcggacagatctcctgaggtcaggagttcaagaccagcctgaccaacatggtgaaaccccgtctctastaacaaatacacaaattagccgagtgtggtggtgggtgcctgtaatcccatctactcsggagtctaaggcagggaaaattgcttgaactcggaggtggaggttgcagtgagccraaatcgtgccactgcactccagtctgggccacagagtgagactccgtcttaaaaaaacaaaaaaagtcaggctttctcactccactgtttttaaaacactgggtcccaagtctgactcagccacttcaccacctggtctgggtttccctgatcaaaaacatgtaggctttctctgggtgagtgttgggttcaacacccttgtccaagctcatctctagaccctcacagggagctggcttctagccctagaatagagtggygctttgtaataactcgagtcatctctcaggtgttgaaggaaaagtgttggaaatgggttgagggaggtgggtgccaagcatgaatggatgggtgaaggtggccagaatggagggaaggtggtgcaggcaggccatccaggctgaagctcctccacctgctcctcttccttccaggcctcctccttgtggctaccctggtcctcctggaccacctcagtttggccagaaacctccccgtggccactccagacccaggaatgttcccatgccttcaccactcccaaaacctgctgagggccgtcagcaacatgctccagaaggtgagcctttcctgtcstctccactgtggacctgcaccctccctgaggaaggggcctctgatcctcccctctggtacctgatggaactgcagagaaattgtggaagttcattagcagctgtcaacagcaggagagggaactttacaaatggcccaagtgttaaagagtcctagtgaaattgtgtctccagagaaagcaagagtagtaataaattataatgatgttggttttggctatgtctacactgagtaaagtggatatttgcagtgttcctgtagcctgccaacagagatagaattgtgtcaggtccacatggtttctctggcaccacaccactgatcaatcccggaaatagttacttgggtgcatactctgtgttggggggcaggggtacaaagatgaaatagccttgtccctcctgctgcccaccagcttctacttggtgacacagttccttcttggagcaacacatctcagggaggactatgacagtgcacatgcagccttcattttctagggaagagttacctaattttatttacagcttcgttcttttaggtttcatattttaatgtaaaaaacattgccgttaaaaactgctccagtagctactgctgcaaaggctaaaggctaatgttttaaaagatgtcctctgcctttctgctctctaggaattttttcttgagtattttctagcttgttgccttaggaatatcttaaaataarctcaatgccaccaagccttcttaaagggctcctttcccctttcaatctttcataatgtgctgtgcattgctcctcacaattcaattaatcttaattggacagggggctcaagtgaaaactgctttgtttcccgaagaaaggttcaaaatgggtaacttttaggtgcyccaattcatatagatttttttgtgcaaaagctgacacccctactcccagatatagtcctaagggtcaaaagattatagaaatcaatttaatgttttgtacatcatttgtcaaatttgctgtagtagaaaacaaatgaggtagatgcaagtgattcaccggccatatccagggcacaggtttgtagaatttgggctatatgtttattttttagtttgatgccattcaaaaaccaaacatttcaattaagatttcaaaattctagcttctcttgaaaagatctgaagaacaacactggactcacacctccaaatctaactctttataacctgctcagaatagtggggttgcccaggtctgtttaaacacctccgggaatagtgtattcatttcctactgctgctgtcacaaatgtagtgggtttaaatgacacaaatttattatcttacagctctgggcatcagaagtccaaaatgggtcctactgggctaaagtcaatgtgtcagcagagctgtagccctttctggaggctcttggggagaatctgttgccttgctttgtcaggtctagaggctgcccacattccttgacttgtggccccttccattgtccataccagcaatgtctggttgagtctttctcatgctgctccctctggacygaccttctaccygcttctacttttgaggwcactgcttacactggattcacccagataatccaggatcatctctctactcttagatcagctgattagcaaattgaatgtcatctgcaccttcattcctctttggcaggtcacatagctcattaccgggttccagggattgggagrtggatgtctttggaggtggagaattggtctagctaccacagaaagggattttactacttgtgcccaaacgtattctgaattttcaggccttgcttcttggctcatgctgttacctctgtctgaaatttccctcctccattgtcgacactttactcctcttaatgtgggtgtcccawctctaggaagctttgcttcccttcctgcccctcctcagaagcttcatgcccttctcaccatgtctcacctactgatgcctcctggtcatttgggcamttgtctgtctcagcagctaaacttgcaatccaggagggtatacatggtcctcttctctgtcatgttcttagtacctaatggagtgcctgccacccattaggctgttgaatggaaaaatgatcgtaatcttcaatcatacagtcctttacttcctaagatacatttcataattttacccaacggtgctttccaacacactaagatgacatctctgtgtatgtgtgtgygtstgtgcactgcaaattaaatctcagcttgtcttaagggtttgcatgtttgttatatccatcaractgtgaccttaacagttccccctttagaagttatacttgaaataggtattcatagaatacagtcactttagcaaaagaagaaacaattttcaccagaagcaagtgtcacagtgaggtgtrgaggctggttagcacaggctgttgacatgatttattgtgtttacataatgaaaaaatatgtaatccagagaaacatgccccaagcttagggagaggagggtgagagacagaatgtaaggaatctattttcttttgtattatgaagaaccagaatttcctgcaagtcaaagtgacagaggtcaagggcagccagccggagccttcctggcaccctggcttaccagccttgtggggtgccaggtgcattatcaatgttataaactgagtttctccttcattttttataggccagacaaactctagaattttacccttgcacttctgaagagattgatcatgaagatatcacaaaagataaaaccagcacagtggaggcctgtttaccattggaattaaccaaggtataaaggattttcctcccagagcatgcagtgtggttaaaaactgtgcatcaaatctcacctgcttctaraaattcacrtttctggtatccatcattatgggattttaactggtcctacttcagaagttagatttgggagaaaaattatttttaaaaaatggttttttttgcaacaatgtgaatacacttaacacttaaaaatagttcagatgctaaatattatgatatgtgtttttaccataataaaaaaaatttgagacctgaagagtcagaaagatttatactaagaattaatactttgatatatgattttttccctctagaatgagagttgcctaaattccagagagacctctttcataactgtaagtcaaaaaatgaaaagtttcagcctgtatgatgaattcatatcactgatgtctgattattttttcctctagaatgggagttgcctggcctccagaaagacctcttttatgatggtaagacacacagctctttcctcaaatgcaatgggggaaatgtttttagcccatctcaatggatacttccccatcttgtcatgtcacccaggccctgtgccttagtagtatttatgaagacttgaagatgtaccaggtggagttcaagaccatgaatgcaaagcttctgatggatcctaagaggcagatctttctrgatcaaaacatgctggcagttattgatgagctgatgcaggtaagacttcattctatcagtgagagcacctttttcatgctaaagataaccagccagggtctttgataaagagatayaaaaagaggtctggaggccttttaaaggcctgacagacctacattttcaagaagacagccttgagggtgccgtctatagggagcacaaatgtgagcagatcacattatgaaaagcagactccaaagtattcactctgtggtatcccccacactcggcaaatgtttttgtgcattttcttatgtcagcctcaaarcaaccatatgggatctgcacaaaggagggaaccaaaccttaggagagttaaaccacttgtctgaggctctgcctcttaaaatccttcaagaggatttcactacacttaccttctcactcacctctaaaggctccaggacgtgctccaggatktgcmtgcaaggggccagtttgcatatctgcaaatattgctgggaaacaagcaagattggtgcctgattatgacccattgtgaaccaaaatgtgaaccaaataaaagaatgacctatcatctggggcatctataatgttattcataggcaagaacttgctttgttatgttctgaatyaccataacacagatgctaatataaaacaaatatttatataagygagggtgactgctttggtgacgaggacatgggataaaaatatggtggcagaaatcattgtctgaaaagtaattgttttacttttattcttttcgtgtgtktgtgtgtgtgtgtgtgtgtgtgtgtgtgtgtgtgtgcatgtgccagatttcttgtttgaaaggcaatgagcttcatccaagtatcaaagaatgttagcatctagagagctgtagttgctatttcatttttaggaccaagagttgggtgatttgggtgctagaatcaattctaccagtaaccagacaactattcccaagtcacttaamccctctgtgcctcagtttcctccagtataaaatggggtgactttattctagctttcttttagactttttgtgaggaagatatgaaagtatttattcatcaagggtgcaaatgtaaggttttatattctgttatcaaatcaaagtgctaaacttgggaaattcattgccaggtttatctgacacaaatggcatgtcttcagtaaacaggcctgttactgatagtgagttctgatcaatagcaatccatcacctccctgtgctaaacagaagtgggctttttaatgtaacatatataaaattaattagatattgcagcagatgtcattttaaaggaactgtttctttctaagacacaactcccactgatgattttttctaaatagttttaagggtcttttcagagctcattgaagatgsatgtgcttggaaaatgagtatttcttttctcattctgcctggtgatctggctgagagtagatttggattgggtttaggagtggcataagggacygagttgcaggctctgagacatgtactggcttcactcatttttatgaatgaatatttgaattttggaataccatgtaagtcatgcttactgttcattctcctaggccctgaatttcaacagtgagactrtgccacaaaaatcctcccttgaagaaccggatttttataaaactaaaatcaagctctgcatacttcttcatgctttcagaattcgggcagtgactattgayagagtgaygagctatctgaatgcttcctaaaaagcgaggtccctccaaaccgttgtcatttttataaaactttgaaatgaggaaactttgataggatgtggattaagaactagggaggggraaagaaggatgggacyattacatccacatratacctctgatcaagtatttttgacatttactgtggataaattgtttttaagttttcatgaatgaattgctaagaagggaaaatatccatcctgaaggtgtttttcattcactttaatagaagggcaaatatttataagctatttctgtaccaaagtgtttgtggaaacaaacatgtaagcataacttattttaaaatatttatttatataacttggtaatcatgaaagcatctgagctaacttatatttatttatgttatatttattaaattatttatcaagtgtatttgaaaaatatttttaagtgttctaaaaataaaagtattgaattaaagtgattctgcaatttttctaatgtacttttaagtgttaaaatatacattgtgggaaaattgaaaactctgatgagacttcaacaaaattactctggaaagaatgccacaatattcttattcctttcctagtccctttcatctcattttaaagggaccctagtaagacaagatatgctttactactaaggcagccaagtgagtcatggtttttgagggtttattatttttgttcaacataagactaaaagtatgctgtgcattagaaaaatacttcatagtattcttcaaccagaaaaaaaatgtcactaagaggccttctagcctaattattctaatttttgtgaccctttgggctctgagagaaaagttgtctctaatttgcaaccagaaaatctctccatttgtttaaaactgtatagaacttttgcctgaaccacatggataattgccttactttggcttaagagatgtgctcttaatgagctaaatgttaaattccatctttttaattctctaaaccaggagtccccgatccccaggccatggagtggtactggtctgtggcctgttgggcagtgggccccacagcagtaggtgagtggcaggtgagcaagtattaccacctgagctccgcctcctgtcagatcagtggcagcattagattctcataggagtgtgaaccctattgtgaactacacatgcaagggatctaggctgcatgctccttataagaatctaagtaatgcctgataatacgaggtggaacagtttcatcccgaaactatctttgccccctgccccccgggtctgtggaaaaattgtcttccacaaaaccagcccctgctgcccaaaaggttgcggaccactgctgtaaatcatgtaaatcttaggtttcatgacttagttcattttgtactgctgtaacagaatatctgagactgggccatttgtaaagaacagtgatttatttttttactgctctggaggttgggaagttcgagaacaaggggccaacatctgatgatggcctttgtgccccatcatcatatggcggaaggtgagagagagagcaagggggtgctgaacgtgtccctttataaggaatccactcccatgataacagcattaatccattcatgagggcagagtcctcattgcctaatcacctcgtaaaggtcccacatctttatactgttacaatggcaattaaacctcaacgtgaggctgggtgcagtggctcactcctctaatcccagcactttgggaggccgaggtgggtggatcacctgatgtcgggagtttgagaccagcctagccaacatagtgaaaccccatctctattaaaaatacaaaaattagccaggtgtggtgacgaacatctgtaatcccagctactcgggaggctgaggcaggagaatctcttgaacccgggaggcagagcttgtagtgagccaagatcgcaccactgcactccagcctgggcaacagagcgagactccgtctcaaaaaaaaaaaaaaaaattcaatgtgagtttgggagggggacacaccacattcaaaccatagcaattcacctgacacaatacaatttaatgttaaggctttgataatccattcctccttaatagaaaaaggacctaaaatacaaaatattttgagtgacccctttcctcagttactcctcccaactgaatcccaatctttctccctgtaaatgtgttatctccttcccaggtcctcctgcatggcaaacattctcgtttttcaaattcttgccctattagacattcaataaaatagaaaccatcagaagctagatcccatcacctatctccttctcttgagtgattcttccacaatcttgaatggtccacaagtgcttcacagacatgggtttctttcaagtgtcgagtctggggtctcagcagctttgacagtgaggagagacgaacggggctgtagagttgcagccacccctcacttggaatggtgactactggttgtctgggcccagagatcaggagggacaagcagacggtctcttccatggactgggtttacacacaagaacacgtgtgtttcttctgttctagaaattagcatgggatatgcttcaaaaacatgactggccacagaaacagcttcatggttcattccattctttattgcatggttagtttttcactttttttaagcctgtgtctgcagtttacaagtagtgtagtatgcttgcaaccaaatcattccaatgctccccattggtctcctcttctgaaaaaggaaggtaatactagaatctacctaaaaggatcagagaaagggtaaaatggaacaactcgtgcaaagggctagcgttgcacctggcacatagtaagtgcacaataaatgtaagcacattttgaaatgtattattagtctttgggctaagcacctgcaccgaatttgttacctcctctttgctgctatttcctcattgatgaaattcagaaaacggtgggacctaattaactgtgttattgtgaagattaaatgacacaatacagtgccagcacctagttattactcaacataaatttgtcacagttctcacaagacatcagaacacccgctgatgtgctgtcccccatggcactcagcatattaagtgtggtcggcacaagcggctgcctggtgtgaagtatgagggcaaaaggcagggtctctgccttccaagaacaaagggtggagagcaaagtaacttttttttttttttgagacggagtttcacttgtcacccaagctagagtgcagtggcgcgattcggctcactgcaacctccaccctccaggttcaagcgattctcctgcctccgcctcctgagtagctgggattacacgtgtccaccaccatacctagataatttttgtatttttagagacagggtttcaccatgctggctaagctggtctcaaactcctagcctcaggtgatccacccacctcggcctctcaaagtgctgggattgcaggcatgagccactgagccaggccaggagcaaagtaacttatcaaaaccaaggaccatccccctaaaaataccccccagtcaattggagattcgtttgattaacaaactactttattcaaaagaaactaaaccttgaaagtgtatctcacacctaagaatgactaaatcagagaattaacatgaaaaatatttagttgtcagctgccccattaaaggtccaggactttgggaagacagaacagttctaggacatggtctggccagacatccaaaggtaagtattgaaaaactcaagagatgtaaaagacccttagacacccaaaggaggataagaaactacagacaaaaagaaaagaacaccagctttgttgggggccagcacccacagccatcataagtcctcttctctgtgtcacactgggccattcagttattatccttatttgaggactaaacattttgggccgggcgcggtggctcacacctgtaatcctagcactttgggaggccaaagcgggcggatcacaaggtcaagagatcaagactatcctggccaacatagtgaaaccctgtctctactaaaaatacaaaaattagttgggcatggtggtgtgtgcctgtagtcccagctactcaggaggctgaggcaggagaattgcttgaacccaggaggcggaggttgcagtgagccgatatcgcaccactgcactccagcctggcaacagagcgagattccatctaaaaaaaaaaattaaaaattaaaaaatacttttggttctggctagcataatttggcttcctagtttaaagcaaactgcattacaatatgataagtaagaaaaaaatatggccgcattgtccaaaaattgaattctatgtacttgaaatattttatttaaaaaagtgaaataggatgcgtataaatgttttgaaatatatgtggtgagaacaggcacaaaaactttagttatatttatgtatctttcaattttacattaaaaatatgagtatgaattagatctatgtaatatcaaaaacagtatattaatggaatctgttttagacaaaaaaaaagtagtagcaactgctcagttgtgcttcctaaatgccaggcatgttcctaagagtttaccacaaataaacataaccatcctaataaccctttttatggatgtggaaagtgaagaaaattattgaagttgaccaggtgcggtgactcatgcctgtaatcccagcattttggaaggccgagatgaaggattgcttgagcccaggagttcaagaccagcctgggcaacatggcaaaatccccatctctacaaaaaataaaaataataaataataagattatgtaagctcacataattaacattttaagtggcctggtctcagcctgtgccagcagctatgctcatgttgaagtcactgtctaagtcaagggaatgctttccctataaccatataaatatcatcccaattatttatgtatctcccttctctctcttgctaaactgtgggaacctcagatataggcaatgtagtattacccacgtatttgtgttcccagccccaggaacttaaaaatgatacagaaacaaagggaatcttcatgagcccccacaattctcatgtcttttcctaatctagatagaaataaagaagtctcagccaggtgtggtggctcatgcctgtaatcccagcactttggggggccgaggtgggcggaccacctgaggtcaggagttcgagaccagcctggccaacatggtgaaaccctgtctctactaaaactacaaaaattagccaggtgtggtggtgtgcgcctgtagtcccagctactcagcaggctgaggcagggaattgcttgaacccaggaggcagaggttgcagtgagctgagatcgtgccactgcactccagcctgggtgacagagcaagactccgtctcaaaaaatacataaataaaaataaaatttaaaaaataagtctctagtctttgaaagaaacttattcacaattataaaaataaagagttaaaaaattgaaaatgcatatgcttacttagttcaaaataattatacatgttcataatggggaaaaatccaaattcataaacgttttgatttagttaacataatttaaatacctgtggtctgagtatatgtctatgcttcagaaacaacgtgccaataaatattccacacctaggggtgggaaagtgttttacttcccattaggttgcagatgtcttagaaacacattcctgcaccacagcttcaagaaatccaaataatgacctgatctgctggtttccaagctaccctaccaggagcaagtcagaggccctgcagggctcctcggtaagccctcgaaatccctctcccctcaatgaccccaccacagcagctccacttttgaatattttaccagtgcgtgttccaggtaagatttcctttcacaaaaggttttcgtgggtaaggaaaaatgaaaacttgctgaattactctaagcccctctctccagttgtttttataatggaaccacctgttgatttccaggcttgctcgaaaagaaaacactgctataaatgcatagagcgtcttcccttctgaaaaggaaacttgtgctagaggttacagaaaacagcaagaatgggattgcaaagaataaaggtggctgactaactctagacttcctaactgaggacttacatcaggaccagaacaaattaggtctaaatctacagtgggctccagggtggaaatggaggtctcacttaagaagcaggagaaatctcaaaactcagagcctagaatttaaccccagggcctccgtgttagcatcagcggctgcagagccaggatcaggacttctcaaatcctgacatatagacagggaggctgagaacacctgtcaaccaaaaacacatgattccagcagtgaatccctgggatcaagctcttcagcaagcagtgtgctggttcaccctaagaagg

(The sequence listing continues in the following parts.)
